(19) United States
(12) Patent Application Publication
(10) Pub. No.: US 2008/0213281 A1
(43) Pub. Date: Sep. 4, 2008

(54) Butyrylcholinesterase Variants that Alter the Activity of Chemotherapeutic Agents

(75) Inventors: Jeffrey D. Watkins, Encinitas, CA (US); James D. Pancock, San Diego, CA (US)

Correspondence Address: ELI LILLY & COMPANY, PATENT DIVISION, P.O. BOX 6288, INDIANAPOLIS, IN, 46206-6288, US

(73) Assignee: Applied Molecular Evolution, Inc. c/o Eli Lilly and Company Patent Division, Indianapolis, IN (US)

(21) Appl. No.: 10/535,441

(22) PCT Filed: Dec. 4, 2003
(86) PCT No.: PCT/US03/38684

§ 371 Date: May 19, 2005

(30) Foreign Application Priority Data
Dec. 4, 2002 (US) 10310666

(51) Int. Cl. A61K 39/395; A61K 38/43; C12N 9/00; C07D 471/04; C07H 19/00; A61P 35/00

(52) U.S. Cl. 424/158.1; 435/183; 536/23.2; 424/94.1; 546/48

(57) ABSTRACT

The invention provides a butyrylchinesterase variant, a method of converting a camptothecin derivative to a topoisomerase inhibitor by contacting the camptothecin derivative with a butyrylcholinesterase variant and a method of treating cancer by administering to an individual an effective amount a butyrylcholinesterase variant exhibiting increased capability to convert a camptothecin derivative to a topoisomerase inhibitor compared to butyrylcholinesterase.

### BACKGROUND OF THE INVENTION

[0001] This invention relates to butyrylcholinesterase variants and, more specifically to the production and therapeutic use thereof.

[0002] Cancer is one of the leading causes of death in the United States. Each year, more than half a million Americans die from cancer, and more than one million are newly diagnosed with the disease. In cancer, neoplastic cells escape from their normal growth regulatory mechanisms and proliferate in an uncontrolled fashion, leading to the development of a malignant tumor. Tumor cells can metastasize to secondary sites if treatment of the primary tumor is either not complete or not initiated before substantial progression of the disease. Early diagnosis and effective treatment of malignant tumors is therefore essential for survival.

[0003] The current methods for treating cancer include surgery, radiation therapy and chemotherapy. A major problem with each of these treatments is their lack of specificity for cancer cells and numerous side-effects. For instance, due to their toxicity to normal tissues, the amount of radiation or chemotherapeutic agent that can be safely used is often inadequate to kill all neoplastic cells. Even a few residual neoplastic cells can be lethal, as they can rapidly proliferate and metastasize to other sites. Unfortunately, the toxicity associated with radiation and chemotherapy is manifested by unpleasant side effects, including nausea and hair loss, that severely reduce the quality of life for the cancer patient undergoing these treatments. Clearly, a more selective and effective means of treating cancer is needed.

[0004] Recently, classes of chemotherapeutic agents have been discovered which are activated within the body to produce a metabolic product which is toxic to cancer cells. These chemotherapeutic agents are sometimes referred to as “pro-drugs” since they are converted within the body to the active drug. Such chemotherapeutic agents include paxlitaxel prodrug and camptothecin (CPT-11). These agents are metabolized by endogenous carboxylesterases, such as butyrylcholinesterase, to yield active drugs such as paxlitaxel and SN-38, respectively. Unfortunately, although these chemotherapeutic agents have good antitumor activity in vitro, several side effects have been reported with these drugs in patients such as diarrhea, hair loss, nausea, vomiting, and cholinergic symptoms.

[0005] The low therapeutic index of these chemotherapeutic agents limits their use for cancer therapy. Because higher doses of these agents result in more side effects, a different method is needed to make these agents more effective. One method is to increase the efficacy of conversion of these agents within the body into the active drug. A number of naturally occurring human butyrylcholinesterase as well as species variations are known, however none of these enzymes exhibits increased pro-drug hydrolysis activity. In addition, enzymes derived from non-human species and intercellular enzymes have been tested for ability to convert pro-drugs into active drugs. However, both enzymes derived from non-human species and intercellular enzymes can be immunogenic which severely limits their use. Advantageously, human butyrylcholinesterase is located in the plasma and is less immunogenic.

[0006] Thus, there exists a need for butyrylcholinesterase variants capable of altering the activity of chemotherapeutic agents more efficiently than wild-type butyrylcholinesterase. The present invention satisfies this need and provides related advantages as well.

### SUMMARY OF THE INVENTION

[0007] The invention provides a butyrylcholinesterase variant having the amino acid sequence selected from SEQ ID NOS: 4, 6, 8, 10, 12, 14, 24, 26, 28, 30, 32, 34, 36, 38, 40, 42, 44, 46, 48, 50, 52, 54, 56, 58, 60, 62, 64, 66, 68, 70, 72, 74, 76, 78, 80, 82, 84, 86, 88, 90, 92, 94, 96, 98, 100, 102, 104, 106, 108, 110, 112, 114, 116, 118, 120, 122, 124, 126, 128, 130, 132, 134, 136, 138, 140, 142, 144, 146, 148, 150, 152, 154, 156, 158, 160, 162, 164, 166, 168, 170, 172, 174, 176, 178, 180, 182, 184, 186, 188, 190, 192, 194, and 196, or functional fragment thereof.

[0008] In addition, the invention provides a method of converting a camptothecin derivative to a topoisomerase inhibitor by contacting the camptothecin derivative with a butyrylcholinesterase variant selected from SEQ ID NOS: 2, 4, 6, 8, 10, 12, 14, 24, 26, 28, 30, 32, 34, 36, 38, 40, 42, 44, 46, 48, 50, 52, 54, 56, 58, 60, 62, 64, 66, 68, 70, 72, 74, 76, 78, 80, 82, 84, 86, 88, 90, 92, 94, 96, 98, 100, 102, 104, 106, 108, 110, 112, 114, 116, 118, 120, 122, 124, 126, 128, 130, 132, 134, 136, 138, 140, 142, 144, 146, 148, 150, 152, 154, 156, 158, 160, 162, 164, 166, 168, 170, 172, 174, 176, 178, 180, 182, 184, 186, 188, 190, 192, 194, and 196, or functional fragment thereof, under conditions that allow conversion of a camptothecin derivative to a topoisomerase inhibitor.

[0009] Further, the invention provides a method of treating cancer by administering to an individual an effective amount of a butyrylcholinesterase variant selected from SEQ ID NO: 2, 4, 6, 8, 10, 12, 14, 24, 26, 28, 30, 32, 34, 36, 38, 40, 42, 44, 46, 48, 50, 52, 54, 56, 58, 60, 62, 64, 66, 68, 70, 72, 74, 76, 78, 80, 82, 84, 86, 88, 90, 92, 94, 96, 98, 100, 102, 104, 106, 108, 110, 112, 114, 116, 118, 120, 122, 124, 126, 128, 130, 132, 134, 136, 138, 140, 142, 144, 146, 148, 150, 152, 154, 156, 158, 160, 162, 164, 166, 168, 170, 172, 174, 176, 178, 180, 182, 184, 186, 188, 190, 192, 194, and 196, or functional fragment thereof, exhibiting increased capability to convert a camptothecin derivative to a topoisomerase inhibitor compared to butyrylcholinesterase.

### BRIEF DESCRIPTION OF THE DRAWINGS

[0010] FIG. 1 shows a representative o-nitrophenyl acetate assay showing butyrylcholinesterase variants with increased carboxylesterase activity.

[0011] FIG. 2 shows the chemical structure of CPT-11 and SN-38 and the conversion of CPT-11 to SN-38 by carboxylesterase activity.

[0012] FIG. 3 shows a high performance liquid chromatography (HPLC) assay for the formation of SN-38. FIG. 3 shows conditioned media from cells that were mock-transfected. The conditioned media was exposed to CPT-11 and analyzed by HPLC for the formation of SN-38.

[0013] FIG. 4 shows a high performance liquid chromatography (HPLC) assay for the formation of SN-38 using conditioned media from cells that were transfected with the F227A variant. The conditioned media was exposed to CPT-11 and analyzed by HPLC for the formation of SN-38. The CPT-11 and SN-38 peaks are labeled.

[0014] FIG. 5 shows a high performance liquid chromatography (HPLC) assay for the formation of SN-38 using conditioned media from cells that were transfected with the F227A/L286S variant. The conditioned media was exposed to CPT-11 and analyzed by HPLC for the formation of SN-38. The CPT-11 and SN-38 peaks are labeled.

[0015] FIG. 6 shows the results of an MTT cytotoxicity assay. CPT-11 was incubated with wild-type butyrylcholinesterase, the 6-6 variant, or F227A/L286Q variant to activate the CPT-11. The percent of SW38 colon carcinoma cells that were killed when exposed to the activated CPT-11 is shown and compared to CPT-11 that was not incubated with butyrylcholinesterase or a butyrylcholinesterase variant (lanes labeled “mock”).

[0016] FIG. 7 shows an ELISA assay demonstrating binding of expressed anti-EGFR-BChE L530 to anti-kappa capture antibody and measuring activity of bound butyrylcholinesterase by butyrylthiocholine hydrolysis.

[0017] FIG. 8 shows an ELISA assay measuring butyrylcholinesterase enzyme activity of the anti-EGFR-BChE L530 specifically bound to a cell membrane preparation containing the EGFR antigen.

[0018] FIG. 9 shows the nucleotide and amino acid sequence of the mouse anti-EGFR variable light chain (SEQ ID NOS: 17 and 18).

[0019] FIG. 10 shows the nucleotide and amino acid sequence of the mouse anti-EGFR variable heavy chain and constant heavy chain hinge region of L530 (SEQ ID NOS: 19 and 20).

[0020] FIG. 11 shows the nucleotide and amino acid sequence of human butyrylcholinesterase (SEQ ID NOS: 21 and 22). The positions of F227, T284, L286, and S287 are marked in bold and underlined.

[0021] FIG. 12 shows a table that depicts quantitation of SN38 conversion by butyrylcholinesterase variant 4-1.

[0022] FIG. 13 shows a Hofstee plot of CPT-11 hydrolysis by butyrylcholinesterase variant 4-1.

[0023] FIG. 14 shows binding of antibody-butyrylcholinesterase fusion proteins to fixed SKW tumor cells.

[0024] FIG. 15 shows targeted cytotoxicity against SKW tumor cells of an anti-CD20-butyrylcholinesterase fusion protein.

[0025] FIG. 16 shows a table setting forth structural and functional characteristics of the butyrylcholinesterase variant F227A (SEQ ID NO:2).

[0026] FIG. 17 shows a table setting forth structural and functional characteristics of the butyrylcholinesterase variants designated SEQ ID NOS: 24 through 176, all of which are double mutations that include the F227A change as one of the two amino acid changes.

[0027] FIG. 18 shows a table setting forth structural and functional characteristics of the butyrylcholinesterase variants designated SEQ ID NOS: 178 through 196, all of which include the F227A change as one of the amino acid changes.

[0028] FIG. 19 shows the amino acid sequence (SEQ ID NO: 202) and corresponding nucleotide sequence (SEQ ID NO: 201) of an anti-CD20 VH-CH1 hinge cys L530 BChE.4-1 heavy chain construct. This is the fusion protein heavy chain comprised of the anti-CD20 antibody variable heavy chain region with a cysteine-containing hinge region and the L530 fragment (SEQ ID NO: 204) of the butyrylcholinesterase variant designated SEQ ID NO: 180, which incorporates the 4-1 variant amino acids (H77F/F227A/P285NN331A).

[0029] FIG. 20 shows the amino acid sequence (SEQ ID NO: 198) and corresponding nucleotide sequence (SEQ ID NO: 197) of an anti-CD20 light chain.

### DETAILED DESCRIPTION OF THE INVENTION

[0030] This invention provides butyrylcholinesterase variants that exhibit increased ability to convert chemotherapeutic agent pro-drugs into active drugs. The identification of butyrylcholinesterase variants that exhibit increased ability to convert chemotherapeutic agent pro-drugs into active drugs provides treatment options for cancer.

[0031] In one embodiment, the invention provides a method of treating an individual suffering from symptoms of cancer. The butyrylcholinesterase variants of the invention hold significant clinical value because of their capability to convert pro-drugs to active drugs at a higher rate than any of the known naturally occurring wild-type butyrylcholinesterase. It is this increase in pro-drug conversion activity that enables a more effective treatment for cancer with less side effect which sets the butyrylcholinesterase variants of the invention apart from other treatment options.

[0032] In one embodiment, the invention provides a method of converting a camptothecin derivative to a topoisomerase inhibitor by contacting the camptothecin derivative with a butyrylcholinesterase variant selected from SEQ ID NOS: 2, 4, 6, 8, 10, 12, 14, 24, 26, 28, 30, 32, 34, 36, 38, 40, 42, 44, 46, 48, 50, 52, 54, 56, 58, 60, 62, 64, 66, 68, 70, 72, 74, 76, 78, 80, 82, 84, 86, 88, 90, 92, 94, 96, 98, 100, 102, 104, 106, 108, 110, 112, 114, 116, 118, 120, 122, 124, 126, 128, 130, 132, 134, 136, 138, 140, 142, 144, 146, 148, 150, 152, 154, 156, 158, 160, 162, 164, 166, 168, 170, 172, 174, 176, 178, 180, 182, 184, 186, 188, 190, 192, 194, 196, or functional fragment thereof, under conditions that allow conversion of a camptothecin derivative to a topoisomerase inhibitor.

[0033] As used herein, the term “butyrylcholinesterase” is intended to refer a polypeptide having the sequence of naturally occurring butyrylcholinesterase. A naturally occurring butyrylcholinesterase can be of any species origin, for example, human, primate, horse, or murine. Therefore, a butyrylcholinesterase can be, for example a vertebrate or invertebrate butyrylcholinesterase, for example a mammalian butyrylcholinesterase. In addition, a butyrylcholinesterase of the invention can be a polymorphism or any other allelic variation of a naturally occurring butyrylcholinesterase. A nucleic acid encoding a butyrylcholinesterase of the invention encodes a polypeptide having the sequence of any naturally occurring butyrylcholinesterase. Therefore, a nucleic acid encoding a butyrylcholinesterase can encode a butyrylcholinesterase of any species origin, for example, human, primate, horse, or murine. In addition, a nucleic acid encoding a butyrylcholinesterase encompasses any naturally occurring allele or polymorphism. A GenBank accession number for human butyrylcholinesterase is M16541.

[0034] As used herein, the term “butyrylcholinesterase variant” is intended to refer to a molecule that is structurally similar to butyrylcholinesterase, but differs by at least one amino acid from butyrylcholinesterase. A butyrylcholinesterase variant has the amino acid sequence as butyrylcholinesterase and exhibits enhanced metabolic capability to convert a camptothecin derivative to a topoisomerase inhibitor. In this regard, a butyrylcholinesterase variant can possess, for example, reduced, the or increased capability to convert a camptothecin derivative to a topoisomerase inhibitor compared to butyrylcholinesterase. For example, the conversion capability of a butyrylcholinesterase variant of the invention can be increased by a factor of 2, 5, 10, 50, 100, 200, 300, 400, 500, 600, 700, 800, 900, 1000, 1100, 1200, 1300, 1400, 1500, 1600, 1700, 1800, 1900, 2000, 2100, 2200, 2300, 2400, 2500, 2600, 2700, 2800, 2900, 3000, 4000, 5000, or more.

[0035] A butyrylcholinesterase variant can have a single amino acid alteration as well as multiple amino acid alterations compared to buyrylcholinesterase. A specific example of a butyrylcholinesterase variant is butyrylcholinesterase having the amino acid alanine at position 227, of which the amino acid sequence and encoding nucleic acid sequence is designated as SEQ ID NOS: 2 and 1, respectively. A further example is the butyrylcholinesterase variant the amino acid Phenylalanine at position 77, the amino acid alanine at position 227, the amino acid Asparagine at position 285, the amino acid alanine at position 331, of which the amino acid sequence and encoding nucleic acid sequence is designated as SEQ ID NOS: 180 and 179, respectively, and which exhibits at least a three thousand-fold increased capability to convert the camptothecin derivative CPT-11 to the topoisomerase inhibitor SN-38 compared to butyrylcholinesterase. The term is also intended to include butyrylcholinesterase variants encompassing, for example, modified forms of naturally occurring amino acids such as D-stereoisomers, non-naturally occurring amino acids, amino acid analogues and mimetics so long as such variants have substantially the same amino acid sequence as butyrylcholinesterase and exhibit capability to convert a camptothecin derivative to a topoisomerase inhibitor. A butyrylcholinesterase variant of the invention can have one or amino acid alterations outside of the regions determined or predicted to be important for conversion capability of a camptothecin derivative to a topoisomerase inhibitor herein. Furthermore, a butyrylcholinesterase variant of the invention can have one or more additional modifications that do not significantly change its capability to convert a camptothecin derivative to a topoisomerase inhibitor activity. A butyrylcholinesterase variant of the invention can also have increased stability compared to butyrylcholinesterase.

[0036] As used herein, the butyrylcolinesterase variants of the invention include sequences that are substantially the same as the reference amino acid sequence and a butyrylcholinesterase variant is thus intended to include a polypeptide, fragment or segment having an identical amino acid sequence, or a polypeptide, fragment or segment having a similar, non-identical sequence that is considered by those skilled in the art to be a functionally equivalent amino acid sequence. An amino acid sequence that is substantially identical to a reference butyrylcholinesterase or butyrylcholinesterase variant of the invention can have at least 70%, at least 80%, at least 81%, at least 83%, at least 85%, at least 90%, at least 95% or more identity to the reference butyrylcholinesterase. Substantially the same amino acid sequence is also intended to include polypeptides encompassing, for example, modified forms of naturally occurring amino acids such as D-stereoisomers, non-naturally occurring amino acids, amino acid analogues and mimetics so long as such polypeptides retain functional activity as defined above. A biological activity of a butyrylcholinesterase variant of the invention is the capability to convert a camptothecin derivative to a topoisomerase inhibitor, as described herein. For example, the butyrylcholinesterase variant F227A designated SEQ ID NO: 2 exhibits at least a three-fold increased capability to convert the camptothecin derivative CPT-11 to the topoisomerase inhibitor SN-38 compared to butyrylcholinesterase. A further example is the butyrylcholinesterase variant H77F, F227A, P285N, V331A designated SEQ ID NO: 180, which exhibits at least a three thousand-fold increased capability to convert the camptothecin derivative CPT-11 to the topoisomerase inhibitor SN-38 compared to butyrylcholinesterase.

[0037] It is understood that minor modifications in the primary amino acid sequence can result in a polypeptide that has a substantially equivalent function as compared to a polypeptide of the invention. These modifications can be deliberate, as through site-directed mutagenesis, or may be accidental such as through spontaneous mutation. For example, it is understood that only a portion of the entire primary structure of a butyrylcholinesterase variant can be required in order to effect the capability to convert a camptothecin derivative to a topoisomerase inhibitor. Moreover, fragments of the sequence of a butyrylcholinesterase variant of the invention are similarly included within the definition as long as at least one biological function of the butyrylcholinesterase variant is retained. It is understood that various molecules can be attached to a polypeptide of the invention, for example, other polypeptides, carbohydrates, lipids, or chemical moieties.

[0038] The nucleic acid molecules of the invention include nucleic acid sequences that are substantially the same to the reference nucleic acid molecule of the invention or a fragment thereof and are intended to include sequences having one or more additions, deletions or substitutions with respect to the reference sequence, so long as the nucleic acid molecule retains its ability to selectively hybridize with the subject nucleic acid molecule under moderately stringent conditions, or highly stringent conditions. Moderately stringent conditions are intended to include hybridization conditions equivalent to hybridization of filter-bound nucleic acid in 50% formamide, 5× Denhart's solution, 5×SSPE, 0.2% SDS at 42° C., followed by washing in 0.2×SSPE, 0.2% SDS, at 50°. As used herein, highly stringent conditions are conditions equivalent to hybridization of filter-bound nucleic acid in 50% formamide, 5× Denhart's solution, 5×SSPE, 0.2% SDS at 42° C., followed by washing in 0.2×SSPE, 0.2% SDS, at 65°. Other suitable moderately stringent and highly stringent hybridization buffers and conditions are well known to those of skill in the art and are described, for example, in Sambrook et al., Molecular Cloning: A Laboratory Manual, Cold Spring Harbor Laboratory, New York (1992) and in Ansubel et al., Current Protocols in Molecular Biology, John Wiley and Sons, Baltimore, Md. (1998). Thus, it is not necessary that two nucleic acids exhibit sequence identity to be substantially complimentary, only that they can specifically hybridize or be made to specifically hybridize without detectable cross reactivity with other similar sequences.

[0039] In general, a nucleic acid molecule that has substantially the same nucleotide sequence as a reference sequence will have greater than about 60% identity, such as greater than about 65%, 70%, 75% identity with the reference sequence, such as greater than about 80%, 85%, 90%, 95%, 97% or 99% identity to the reference sequence over the length of the two sequences being compared. Identity of any two nucleic acid sequences can be determined by those skilled in the art based, for example, on a BLAST 2.0 computer alignment, using default parameters. BLAST 2.0 searching is available at ncbi.nlm.nih.gov/gorf/bl2.html., as described by Tatiana et al., FEMS Microbiol Lett. 174:247-250 (1999).

[0040] As used herein, the term “fragment” when used in reference to a nucleic acid encoding the claimed polypeptides is intended to mean a nucleic acid having substantially the same sequence as a portion of a nucleic acid encoding a polypeptide of the invention or segments thereof. The nucleic acid fragment is sufficient in length and sequence to selectively hybridize to a butyrylcholinesterase variant encoding nucleic acid or a nucleotide sequence that is complimentary to a butyrylcholinesterase variant encoding nucleic acid. Therefore, fragment is intended to include primers for sequencing and polymerase chain reaction (PCR) as well as probes for nucleic acid blot or solution hybridization.

[0041] Similarly, the term “functional fragment” when used in reference to a nucleic acid encoding a butyrylcholinesterase or butyrylcholinesterase variant is intended to refer to a portion of the nucleic acid that encodes a portion of the butyrylcholinesterase or butyrylcholinesterase variant that still retains some or all of the metabolic conversion capability of the parent polypeptide. A functional fragment of a polypeptide of the invention exhibiting a functional activity can have, for example, at least 6 contiguous amino acid residues from the polypeptide, at least 8, 10, 15, 20, 30 or 40 amino acids, and often has at least 50, 75, 100, 200, 300, 400 or more amino acids of a polypeptide of the invention, up to the full length polypeptide minus one amino acid. An example of a functional fragment of a butyrylcholinesterase variant of the invention is a variant that is truncated at position 530, which is a Leucine residue in the wild-type butytlcholinesterase. While a L530 truncation has no effect on the functional activity of the corresponding full-length variant, the truncation prevents formation of tetramers, thereby enhancing bioactivity and pharmacokinetic properties of the variant. Therefore, a butyrylcholinesterase variant of the invention includes an L530 truncation, which is considered a functional fragment of the reference variant.

[0042] As used herein, the term “functional fragment” in regard to a polypeptide of the invention, refers to a portion of the reference polypeptide that is capable of exhibiting or carrying out a functional activity of the reference polypeptide. A functional fragment of a polypeptide of the invention exhibiting a functional activity can have, for example, at least 6 contiguous amino acid residues from the polypeptide, at least 8, 10, 15, 20, 30 or 40 amino acids, and often has at least 50, 75, 100, 200, 300, 400 or more amino acids of a polypeptide of the invention, up to the full length polypeptide minus one amino acid. The appropriate length and amino acid sequence of a functional fragment of a polypeptide of the invention can be determined by those skilled in the art, depending on the intended use of the functional fragment. For example, a functional fragment of a butyrylcholinesterase or butyrylcholinesterase variant is intended to refer to a portion of the butyrylcholinesterase or butyrylcholinesterase variant that still retains some or all of the metabolic conversion capability of the parent polypeptide.

[0043] As used herein, the term “antibody” is intended to mean a polypeptide produced in response to an antigen which has the ability to specifically bind to the antigen which induced its formation. Antibodies include, for example, monoclonal and polyclonal antibodies, single chain antibodies, chimeric antibodies, bifunctional or bispecific antibodies, humanized antibodies, human antibodies, and complementary determining region (CDR)-grafted antibodies, including compounds which include CDR or antigen-binding sequences, which specifically bind to a polypeptide of the invention. An “antibody fragment” refers to a portion of an antibody polypeptide that retains some part of the function of the intact antibody. For example, an antibody fragment can retain some or all of the antigen binding ability of the intact antibody. Antibody fragments include, for example, Fab, Fab′, F(ab′)₂, and Fv. Screening assays to determine binding specificity or exclusivity of an antibody or antibody fragment of the invention are well known in the art (see Harlow et al. (Eds), Antibodies A Laboratory Manual; Cold Spring Harbor Laboratory; Cold Spring Harbor, N.Y. (1988)).

[0044] Antibodies that can be used in the invention can be produced using any method well known in the art, using any polypeptide, or immunogenic fragment thereof, of the invention. For example, a humanized antibody can be prepared with fully human germline framework regions. In addition, immunogenic polypeptides can be isolated from natural sources, from recombinant host cells, or can be chemically synthesized. Methods for synthesizing such peptides are known in the art, for example, as in, R. P. Merrifield, J. Amer. Chem. Soc. 85: 2149-2154 (1963); J. L. Krstenansky, et al., FEBS Lett. 211:10 (1987).

[0045] As used herein, the term “camptothecin derivative” refers to a compound that has a structure the same or substantially the same as camptothecin and that can be hydrolyzed by butyrylcholinesterase or a butyrylcholinesterase variant. For example, a camptothecin derivative can be hydrolyzed by the F227A/L286Q variant (SEQ ID NO:6). Camptothecin is derived from the stem bark of a Chinese tree called Camptotheca acuminata Decaisne. Camptothecin derivatives can inhibit DNA topoisomerase I through their metabolic break-down products. The structure of a water soluble camptothecin derivative, CPT-11, is shown in FIG. 2. The chemical name of CPT-11 is 7-ethyl-10-[4-(1-piperidino)-1-piperidine]carbonyloxycamptothecin. CPT-11 is also known by the names CAMPTOSAR and Irinotecan. Members of the camptothecins include, for example, topotecan, irinotecan, 9-aminocamptothecin and 9-nitrocamptothecin which are analogs of the plant alkaloid 20(S)-camptothecin.

[0046] As used herein, the term “topoisomerase inhibitor” refers to a compound that can inhibit a topoisomerase. Several topoisomerases are known in the literature. For example, a topoisomerase inhibitor can inhibit a type I topoisomerase, such as topoisomerase I, or a type II topoisomerase. Type I enzymes act by making a transient break in one strand of DNA and type II enzymes act by introducing a transient double strand break. Some DNA topoisonerases can relax or remove only negative supercoils from DNA while others can relax both negative and positive supercoils and still others can introduce negative supercoils. An example of a topoisomerase inhibitor is SN-38, the structure of which is shown in FIG. 2.

[0047] The chemical name of SN-38 is 7-ethyl-10-hydroxycamptothecin. In vitro, SN38 has been shown to be greater than 1000-fold more cytotoxic than CPT-11 (Pavillard et al., Cancer Chemother Pharmacol. 49: 329-35 (2002)). In humans it is believed that prodrug conversion takes place primarily in the liver through the activities of two carboxylesterase isoforms, human carboxylesterase-1 (hCE-1) and human carboxylesterase-2 (hCE-2) (Humerickhouse et al., Cancer Res 60: 1189-92 (2000)). The Km values are 3.4 μM and 43 μM for hCE-2 and hCE-1, respectively, and the catalytic efficiency of hCE-2 is 60-fold higher than that of hCE-1. At pharmacologically relevant concentrations of the drug (˜1-10 μM), hCE-2 converts CPT-11 to SN38 at a 25-30-fold higher rate than hCE-1 (12). SN-38 can interact with topoisomerase I and DNA to form cleavage complexes, and prevent resealing of the topoisomerase I-mediated DNA single strand breaks. This interaction eventually can lead to double-strand DNA breaks and cell death such as apoptosis.

[0048] As used herein, the term “camptothecin conversion activity” or camptothecin hydrolysis activity is intended to mean the chemical conversion of a camptothecin derivative to a topoisomerase inhibitor. For example, the conversion of CPT-11 to SN-38 is shown in FIG. 2. Conversion activity can be measured both directly or indirectly using several assays described herein (see Example II, III, and IV).

[0049] As used herein, the term “effective amount” is intended to mean an amount of a butyrylcholinesterase variant of the invention that can reduce the severity of cancer. Reduction in severity includes, for example, an arrest or a decrease in symptoms, physiological indicators, biochemical markers or metabolic indicators. Symptoms of cancer include, for example, weight loss, pain, and organ failure. As used herein, the term “treating” is intended to mean causing a reduction in the severity of cancer.

[0050] The invention provides a butyrylcholinesterase variant having the amino acid sequence selected from SEQ ID NOS: 4, 6, 8, 10, 12, 14, 24, 26, 28, 30, 32, 34, 36, 38, 40, 42, 44, 46, 48, 50, 52, 54, 56, 58, 60, 62, 64, 66, 68, 70, 72, 74, 76, 78, 80, 82, 84, 86, 88, 90, 92, 94, 96, 98, 100, 102, 104, 106, 108, 110, 112, 114, 116, 118, 120, 122, 124, 126, 128, 130, 132, 134, 136, 138, 140, 142, 144, 146, 148, 150, 152, 154, 156, 158, 160, 162, 164, 166, 168, 170, 172, 174, 176, 178, 180, 182, 184, 186, 188, 190, 192, 194, and 196, or functional fragment thereof. The invention also provides a butyrylcholinesterase-variant where the amino acid contains SEQ ID NO: 4, or functional fragment thereof. The invention further provides a butyrylcholinesterase variant where the amino acid contains SEQ ID NO: 6, or functional fragment thereof. The invention also provides a butyrylcholinesterase variant where the amino acid contains SEQ ID NO: 8, or functional fragment thereof. The invention further provides a butyrylcholinesterase variant where the amino acid contains SEQ ID NO: 10, or functional fragment thereof. The invention also provides a butyrylcholinesterase variant where the amino acid contains SEQ ID NO: 12, or functional fragment thereof. The invention further provides a butyrylcholinesterase variant where the amino acid contains SEQ ID NO: 14, or functional fragment thereof. The invention further provides a butyrylcholinesterase variant where the amino acid contains SEQ ID NO: 24, or functional fragment thereof. The invention further provides a butyrylcholinesterase variant where the amino acid contains SEQ ID NO: 26, or functional fragment thereof. The invention further provides a butyrylcholinesterase variant where the amino acid contains SEQ ID NO: 28, or functional fragment thereof. The invention further provides a butyrylcholinesterase variant where the amino acid contains SEQ ID NO: 30, or functional fragment thereof. The invention further provides a butyrylcholinesterase variant where the amino acid contains SEQ ID NO: 32, or functional fragment thereof.

[0051] The invention further provides a butyrylcholinesterase variant where the amino acid contains SEQ ID NO: 34, or functional fragment thereof. The invention further provides a butyrylcholinesterase variant where the amino acid contains SEQ ID NO: 36, or functional fragment thereof. The invention further provides a butyrylcholinesterase variant where the amino acid contains SEQ ID NO: 38, or functional fragment thereof. The invention further provides a butyrylcholinesterase variant where the amino acid contains SEQ ID NO: 40, or functional fragment thereof. The invention further provides a butyrylcholinesterase variant where the amino acid contains SEQ ID NO: 42, or functional fragment thereof. The invention further provides a butyrylcholinesterase variant where the amino acid contains SEQ ID NO: 44, or functional fragment thereof. The invention further provides a butyrylcholinesterase variant where the amino acid contains SEQ ID NO: 46, or functional fragment thereof. The invention further provides a butyrylcholinesterase variant where the amino acid contains SEQ ID NO: 48, or functional fragment thereof. The invention further provides a butyrylcholinesterase variant where the amino acid contains SEQ ID NO: 50, or functional fragment thereof. The invention further provides a butyrylcholinesterase variant where the amino acid contains SEQ ID NO: 52, or functional fragment thereof. The invention further provides a butyrylcholinesterase variant where the amino acid contains SEQ ID NO: 54, or functional fragment thereof. The invention further provides a butyrylcholinesterase variant where the amino acid contains SEQ ID NO: 56, or functional fragment thereof. The invention further provides a butyrylcholinesterase variant where the amino acid contains SEQ ID NO: 58, or functional fragment thereof. The invention further provides a butyrylcholinesterase variant where the amino acid contains SEQ ID NO: 60, or functional fragment thereof. The invention further provides a butyrylcholinesterase variant where the amino acid contains SEQ ID NO: 62, or functional fragment thereof. The invention further provides a butyrylcholinesterase variant where the amino acid contains SEQ ID NO: 64, or functional fragment thereof. The invention further provides a butyrylcholinesterase variant where the amino acid contains SEQ ID NO: 66, or functional fragment thereof. The invention further provides a butyrylcholinesterase variant where the amino acid contains SEQ ID NO: 68, or functional fragment thereof. The invention further provides a butyrylcholinesterase variant where the amino acid contains SEQ ID NO: 70, or functional fragment thereof. The invention further provides a butyrylcholinesterase variant where the amino acid contains SEQ ID NO: 72, or functional fragment thereof. The invention further provides a butyrylcholinesterase variant where the amino acid contains SEQ ID NO: 74, or functional fragment thereof. The invention further provides a butyrylcholinesterase variant where the amino acid contains SEQ ID NO: 76, or functional fragment thereof. The invention further provides a butyrylcholinesterase variant where the amino acid contains SEQ ID NO: 78, or functional fragment thereof. The invention further provides a butyrylcholinesterase variant where the amino acid contains SEQ ID NO: 80, or functional fragment thereof. The invention further provides a butyrylcholinesterase variant where the amino acid contains SEQ ID NO: 82, or functional fragment thereof. The invention further provides a butyrylcholinesterase variant where the amino acid contains SEQ ID NO: 84, or functional fragment thereof. The invention further provides a butyrylcholinesterase variant where the amino acid contains SEQ ID NO: 86, or functional fragment thereof. The invention further provides a butyrylcholinesterase variant where the amino acid contains SEQ ID NO: 88, or functional fragment thereof. The invention further provides a butyrylcholinesterase variant where the amino acid contains SEQ ID NO: 90, or functional fragment thereof. The invention further provides a butyrylcholinesterase variant where the amino acid contains SEQ ID NO: 92, or functional fragment thereof. The invention further provides a butyrylcholinesterase variant where the amino acid contains SEQ ID NO: 94, or functional fragment thereof. The invention further provides a butyrylcholinesterase variant where the amino acid contains SEQ ID. NO: 96, or functional fragment thereof. The invention further provides a butyrylcholinesterase variant where the amino acid contains SEQ ID NO: 98, or functional fragment thereof. The invention further provides a butyrylcholinesterase variant where the amino acid contains SEQ ID NO: 100, or functional fragment thereof. The invention further provides a butyrylcholinesterase variant where the amino acid contains SEQ ID NO: 102, or functional fragment thereof. The invention further provides a butyrylcholinesterase variant where the amino acid contains SEQ ID NO: 104, or functional fragment thereof. The invention further provides a butyrylcholinesterase variant where the amino acid contains SEQ ID NO: 106, or functional fragment thereof. The invention further provides a butyrylcholinesterase variant where the amino acid contains SEQ ID NO: 108, or functional fragment thereof. The invention further provides a butyrylcholinesterase variant where the amino acid contains SEQ ID NO: 110, or functional fragment thereof. The invention further provides a butyrylcholinesterase variant where the amino acid contains SEQ ID NO: 112, or functional fragment thereof. The invention further provides a butyrylcholinesterase variant where the amino acid contains SEQ ID NO: 114, or functional fragment thereof. The invention further provides a butyrylcholinesterase variant where the amino acid contains SEQ ID NO: 116, or functional fragment thereof. The invention further provides a butyrylcholinesterase variant where the amino acid contains SEQ ID NO: 118, or functional fragment thereof. The invention further provides a butyrylcholinesterase variant where the amino acid contains SEQ ID NO: 120, or functional fragment thereof. The invention further provides a butyrylcholinesterase variant where the amino acid contains SEQ ID NO: 122, or functional fragment thereof. The invention further provides a butyrylcholinesterase variant where the amino acid contains SEQ ID NO: 124, or functional fragment thereof. The invention further provides a butyrylcholinesterase variant where the amino acid contains SEQ ID NO: 126, or functional fragment thereof. The invention further provides a butyrylcholinesterase variant where the amino acid contains SEQ ID NO: 128, or functional fragment thereof. The invention further provides a butyrylcholinesterase variant where the amino acid contains SEQ ID NO: 130, or functional fragment thereof. The invention further provides a butyrylcholinesterase variant where the amino acid contains SEQ ID NO: 132, or functional fragment thereof. The invention further provides a butyrylcholinesterase variant where the amino acid contains SEQ ID NO: 134, or functional fragment thereof. The invention further provides a butyrylcholinesterase variant where the amino acid contains SEQ ID NO: 136, or functional fragment thereof. The invention further provides a butyrylcholinesterase variant where the amino acid contains SEQ ID NO: 138, or functional fragment thereof. The invention further provides a butyrylcholinesterase variant where the amino acid contains SEQ ID NO: 140, or functional fragment thereof. The invention further provides a butyrylcholinesterase variant where the amino acid contains SEQ ID NO: 142, or functional fragment thereof. The invention further provides a butyrylcholinesterase variant where the amino acid contains SEQ ID NO: 144, or functional fragment thereof. The invention further provides a butyrylcholinesterase variant where the amino acid contains SEQ ID NO: 146, or functional fragment thereof. The invention further provides a butyrylcholinesterase variant where the amino acid contains SEQ ID NO: 148, or functional fragment thereof. The invention further provides a butyrylcholinesterase variant where the amino acid contains SEQ ID NO: 150, or functional fragment thereof. The invention further provides a butyrylcholinesterase variant where the amino acid contains SEQ ID NO: 152, or functional fragment thereof. The invention further provides a butyrylcholinesterase variant where the amino acid contains SEQ ID NO: 154, or functional fragment thereof. The invention further provides a butyrylcholinesterase variant where the amino acid contains SEQ ID NO: 156, or functional fragment thereof. The invention further provides a butyrylcholinesterase variant where the amino acid contains SEQ ID NO: 158, or functional fragment thereof. The invention further provides a butyrylcholinesterase variant where the amino acid contains SEQ ID NO: 160, or functional fragment thereof. The invention further provides a butyrylcholinesterase variant where the amino acid contains SEQ ID NO: 162, or functional fragment thereof. The invention further provides a butyrylcholinesterase variant where the amino acid contains SEQ ID NO: 164, or functional fragment thereof. The invention further provides a butyrylcholinesterase variant where the amino acid contains SEQ ID NO: 166, or functional fragment thereof. The invention further provides a butyrylcholinesterase variant where the amino acid contains SEQ ID NO: 168, or functional fragment thereof. The invention further provides a butyrylcholinesterase variant where the amino acid contains SEQ ID NO: 170, or functional fragment thereof. The invention further provides a butyrylcholinesterase variant where the amino acid contains SEQ ID NO: 172, or functional fragment thereof. The invention further provides a butyrylcholinesterase variant where the amino acid contains SEQ ID NO: 174, or functional fragment thereof. The invention further provides a butyrylcholinesterase variant where the amino acid contains SEQ ID NO: 176, or functional fragment thereof. The invention further provides a butyrylcholinesterase variant where the amino acid contains SEQ ID NO: 178, or functional fragment thereof. The invention further provides a butyrylcholinesterase variant where the amino acid contains SEQ ID NO: 180, or functional fragment thereof. The invention further provides a butyrylcholinesterase variant where the amino acid contains SEQ ID NO: 182, or functional fragment thereof. The invention further provides a butyrylcholinesterase variant where the amino acid contains SEQ ID NO: 184, or functional fragment thereof. The invention further provides a butyrylcholinesterase variant where the amino acid contains SEQ ID NO: 186, or functional fragment thereof. The invention further provides a butyrylcholinesterase variant where the amino acid contains SEQ ID NO: 188, or functional fragment thereof. The invention further provides a butyrylcholinesterase variant where the amino acid contains SEQ ID NO: 190, or functional fragment thereof. The invention further provides a butyrylcholinesterase variant where the amino acid contains SEQ ID NO: 192, or functional fragment thereof. The invention further provides a butyrylcholinesterase variant where the amino acid contains SEQ ID NO: 194, or functional fragment thereof. The invention further provides a butyrylcholinesterase variant where the amino acid contains SEQ ID NO: 196, or functional fragment thereof.

[0052] The invention provides a butyrylcholinesterase variant having a 3000-fold increase in camptothecin conversion activity compared to butyrylcholinesterase, or functional fragment thereof. The invention also provides a butyrylcholinesterase variant having at least a 4-fold, 6-fold, 8-fold, 10-fold, 15-fold, 20-fold, 25-fold, 30-fold, 35-fold, 40-fold, 45-fold, 50-fold, 100-fold, 200-fold, 300-fold, 400-fold, 500-fold, 600-fold, 700-fold, 800-fold, 900-fold, 1000-fold, 1100-fold, 1200-fold, 1300-fold, 1400-fold, 1500-fold, 1600-fold, 1700-fold, 1800-fold, 1900-fold, 2000-fold, 2100-fold, 2200-fold, 2300-fold, 2400-fold, 2500-fold, 2600-fold, 2700-fold, 2800-fold, 2900-fold, 3000-fold, 3100-fold, 3200-fold, 3500-fold or greater increase in camptothecin conversion activity compared to butyrylcholinesterase, or functional fragment thereof.

[0053] The invention further provides a nucleic acid encoding a butyrylcholinesterase variant having the nucleic acid sequence selected from SEQ ID NOS: 3, 5, 7, 9, 11, 13, 23, 25, 27, 29, 31, 33, 35, 37, 39, 41, 43, 45, 47, 49, 51, 53, 55, 57, 59, 61, 63, 65, 67, 69, 71, 73, 75, 77, 79, 81, 83, 85, 87, 89, 91, 93, 95, 97, 99, 101, 103, 105, 107, 109, 111, 113, 115, 117, 119, 121, 123, 125, 127, 129, 131, 133, 135, 137, 139, 141, 143, 145, 147, 149, 151, 153, 155, 157, 159, 161, 163, 165, 167, 169, 171, 173, 175, 177, 179, 181, 183, 185, 187, 189, 191, 193, and 195, or fragment thereof. In addition the invention provides a nucleic acid encoding a butyrylcholinesterase variant having the amino acid sequence selected from SEQ ID NOS: 4, 6, 8, 10, 12, 14, 24, 26, 28, 30, 32, 34, 36, 38, 40, 42, 44, 46, 48, 50, 52, 54, 56, 58, 60, 62, 64, 66, 68, 70, 72, 74, 76, 78, 80, 82, 84, 86, 88, 90, 92, 94, 96, 98, 100, 102, 104, 106, 108, 110, 112, 114, 116, 118, 120, 122, 124, 126, 128, 130, 132, 134, 136, 138, 140, 142, 144, 146, 148, 150, 152, 154, 156, 158, 160, 162, 164, 166, 168, 170, 172, 174, 176, 178, 180, 182, 184, 186, 188, 190, 192, 194, and 196, or a functional fragment thereof. Further, the invention provides a nucleic acid encoding a butyrylcholinesterase variant containing the nucleic acid sequence SEQ ID NO: 3, or a functional fragment thereof. The invention also provides a nucleic acid encoding a butyrylcholinesterase variant containing the nucleic acid sequence SEQ ID NO: 5, or a functional fragment thereof. In addition the invention provides a nucleic acid encoding a butyrylcholinesterase variant containing the nucleic acid sequence SEQ ID NO: 7, or a functional fragment thereof. The invention also provides a nucleic acid encoding a butyrylcholinesterase variant containing the nucleic acid sequence SEQ ID NO: 9, or a functional fragment thereof. The invention also provides a nucleic acid encoding a butyrylcholinesterase variant containing the nucleic acid sequence SEQ ID NO: 11, or a functional fragment thereof. The invention further provides a nucleic acid encoding a butyrylcholinesterase variant containing the nucleic acid sequence SEQ ID NO: 13, or a functional fragment thereof. The invention further provides a nucleic acid encoding a butyrylcholinesterase variant containing the nucleic acid sequence SEQ ID NO: 23, or a functional fragment thereof. The invention further provides a nucleic acid encoding a butyrylcholinesterase variant containing the nucleic acid sequence SEQ ID NO: 25, or a functional fragment thereof. The invention further provides a nucleic acid encoding a butyrylcholinesterase variant containing the nucleic acid sequence SEQ ID NO: 27, or a functional fragment thereof. The invention further provides a nucleic acid encoding a butyrylcholinesterase variant containing the nucleic acid sequence SEQ ID NO: 29, or a functional fragment thereof. The invention further provides a nucleic acid encoding a butyrylcholinesterase variant containing the nucleic acid sequence SEQ ID NO: 31, or a functional fragment thereof. The invention further provides a nucleic acid encoding a butyrylcholinesterase variant containing the nucleic acid sequence SEQ ID NO: 33, or a functional fragment thereof. The invention further provides a nucleic acid encoding a butyrylcholinesterase variant containing the nucleic acid sequence SEQ ID NO: 35, or a functional fragment thereof. The invention further provides a nucleic acid encoding a butyrylcholinesterase variant containing the nucleic acid sequence SEQ ID NO: 37, or a functional fragment thereof. The invention further provides a nucleic acid encoding a butyrylcholinesterase variant containing the nucleic acid sequence SEQ ID NO: 39, or a functional fragment thereof. The invention further provides a nucleic acid encoding a butyrylcholinesterase variant containing the nucleic acid sequence SEQ ID NO: 41, or a functional fragment thereof. The invention further provides a nucleic acid encoding a butyrylcholinesterase variant containing the nucleic acid sequence SEQ ID NO: 43, or a functional fragment thereof. The invention further provides a nucleic acid encoding a butyrylcholinesterase variant containing the nucleic acid sequence SEQ ID NO: 45, or a functional fragment thereof. The invention further provides a nucleic acid encoding a butyrylcholinesterase variant containing the nucleic acid sequence SEQ ID NO: 47, or a functional fragment thereof. The invention further provides a nucleic acid encoding a butyrylcholinesterase variant containing the nucleic acid sequence SEQ ID NO: 49, or a functional fragment thereof. The invention further provides a nucleic acid encoding a butyrylcholinesterase variant containing the nucleic acid sequence SEQ ID NO: 51, or a functional fragment thereof. The invention further provides a nucleic acid encoding a butyrylcholinesterase variant containing the nucleic acid sequence SEQ ID NO: 53, or a functional fragment thereof. The invention further provides a nucleic acid encoding a butyrylcholinesterase variant containing the nucleic acid sequence SEQ ID NO: 55, or a functional fragment thereof. The invention further provides a nucleic acid encoding a butyrylcholinesterase variant containing the nucleic acid sequence SEQ ID NO: 57, or a functional fragment thereof. The invention further provides a nucleic acid encoding a butyrylcholinesterase variant containing the nucleic acid sequence SEQ ID NO: 59, or a functional fragment thereof. The invention further provides a nucleic acid encoding a butyrylcholinesterase variant containing the nucleic acid sequence SEQ ID NO: 61, or a functional fragment thereof. The invention further provides a nucleic acid encoding a butyrylcholinesterase variant containing the nucleic acid sequence SEQ ID NO: 63, or a functional fragment thereof. The invention further provides a nucleic acid encoding a butyrylcholinesterase variant containing the nucleic acid sequence SEQ ID NO: 65, or a functional fragment thereof. The invention further provides a nucleic acid encoding a butyrylcholinesterase variant containing the nucleic acid sequence SEQ ID NO: 67, or a functional fragment thereof. The invention further provides a nucleic acid encoding a butyrylcholinesterase variant containing the nucleic acid sequence SEQ ID NO: 69, or a functional fragment thereof. The invention further provides a nucleic acid encoding a butyrylcholinesterase variant containing the nucleic acid sequence SEQ ID NO: 71, or a functional fragment thereof. The invention further provides a nucleic acid encoding a butyrylcholinesterase variant containing the nucleic acid sequence SEQ ID NO: 73, or a functional fragment thereof. The invention further provides a nucleic acid encoding a butyrylcholinesterase variant containing the nucleic acid sequence SEQ ID NO: 75, or a functional fragment thereof. The invention further provides a nucleic acid encoding a butyrylcholinesterase variant containing the nucleic acid sequence SEQ ID NO: 77, or a functional fragment thereof. The invention further provides a nucleic acid encoding a butyrylcholinesterase variant containing the nucleic acid sequence SEQ ID NO: 79, or a functional fragment thereof. The invention further provides a nucleic acid encoding a butyrylcholinesterase variant containing the nucleic acid sequence SEQ ID NO: 81, or a functional fragment thereof. The invention further provides a nucleic acid encoding a butyrylcholinesterase variant containing the nucleic acid sequence SEQ ID NO: 83, or a functional fragment thereof. The invention further provides a nucleic acid encoding a butyrylcholinesterase variant containing the nucleic acid sequence SEQ ID NO: 85, or a functional fragment thereof. The invention further provides a nucleic acid encoding a butyrylcholinesterase variant containing the nucleic acid sequence SEQ ID NO: 87, or a functional fragment thereof. The invention further provides a nucleic acid encoding a butyrylcholinesterase variant containing the nucleic acid sequence SEQ ID NO: 89, or a functional fragment thereof. The invention further provides a nucleic acid encoding a butyrylcholinesterase variant containing the nucleic acid sequence SEQ ID NO: 91, or a functional fragment thereof. The invention further provides a nucleic acid encoding a butyrylcholinesterase variant containing the nucleic acid sequence SEQ ID NO: 93, or a functional fragment thereof. The invention further provides a nucleic acid encoding a butyrylcholinesterase variant containing the nucleic acid sequence SEQ ID NO: 95, or a functional fragment thereof. The invention further provides a nucleic acid encoding a butyrylcholinesterase variant containing the nucleic acid sequence SEQ ID NO: 97, or a functional fragment thereof. The invention further provides a nucleic acid encoding a butyrylcholinesterase variant containing the nucleic acid sequence SEQ ID NO: 99, or a functional fragment thereof. The invention further provides a nucleic acid encoding a butyrylcholinesterase variant containing the nucleic acid sequence SEQ ID NO: 101, or a functional fragment thereof. The invention further provides a nucleic acid encoding a butyrylcholinesterase variant containing the nucleic acid sequence SEQ ID NO: 103, or a functional fragment thereof. The invention further provides a nucleic acid encoding a butyrylcholinesterase variant containing the nucleic acid sequence SEQ ID NO: 105, or a functional fragment thereof. The invention further provides a nucleic acid encoding a butyrylcholinesterase variant containing the nucleic acid sequence SEQ ID NO: 107, or a functional fragment thereof. The invention further provides a nucleic acid encoding a butyrylcholinesterase variant containing the nucleic acid sequence SEQ ID NO: 109, or a functional fragment thereof. The invention further provides a nucleic acid encoding a butyrylcholinesterase variant containing the nucleic acid sequence SEQ ID NO: 111, or a functional fragment thereof. The invention further provides a nucleic acid encoding a butyrylcholinesterase variant containing the nucleic acid sequence SEQ ID NO: 113, or a functional fragment thereof. The invention further provides a nucleic acid encoding a butyrylcholinesterase variant containing the nucleic acid sequence SEQ ID NO: 115, or a functional fragment thereof. The invention further provides a nucleic acid encoding a butyrylcholinesterase variant containing the nucleic acid sequence SEQ ID NO: 117, or a functional fragment thereof. The invention further provides a nucleic acid encoding a butyrylcholinesterase variant containing the nucleic acid sequence SEQ ID NO: 119, or a functional fragment thereof. The invention further provides a nucleic acid encoding a butyrylcholinesterase variant containing the nucleic acid sequence SEQ ID NO: 121, or a functional fragment thereof. The invention further provides a nucleic acid encoding a butyrylcholinesterase variant containing the nucleic acid sequence SEQ ID NO: 123, or a functional fragment thereof. The invention further provides a nucleic acid encoding a butyrylcholinesterase variant containing the nucleic acid sequence SEQ ID NO: 125, or a functional fragment thereof. The invention further provides a nucleic acid encoding a butyrylcholinesterase variant containing the nucleic acid sequence SEQ ID NO: 127, or a functional fragment thereof. The invention further provides a nucleic acid encoding a butyrylcholinesterase variant containing the nucleic acid sequence SEQ ID NO: 129, or a functional fragment thereof. The invention further provides a nucleic acid encoding a butyrylcholinesterase variant containing the nucleic acid sequence SEQ ID NO: 131, or a functional fragment thereof. The invention further provides a nucleic acid encoding a butyrylcholinesterase variant containing the nucleic acid sequence SEQ ID NO: 133, or a functional fragment thereof. The invention further provides a nucleic acid encoding a butyrylcholinesterase variant containing the nucleic acid sequence SEQ ID NO: 135, or a functional fragment thereof. The invention further provides a nucleic acid encoding a butyrylcholinesterase variant containing the nucleic acid sequence SEQ ID NO: 137, or a functional fragment thereof. The invention further provides a nucleic acid encoding a butyrylcholinesterase variant containing the nucleic acid sequence SEQ ID NO: 139, or a functional fragment thereof. The invention further provides a nucleic acid encoding a butyrylcholinesterase variant containing the nucleic acid sequence SEQ ID NO: 141, or a functional fragment thereof. The invention further provides a nucleic acid encoding a butyrylcholinesterase variant containing the nucleic acid sequence SEQ ID NO: 143, or a functional fragment thereof. The invention further provides a nucleic acid encoding a butyrylcholinesterase variant containing the nucleic acid sequence SEQ ID NO: 145, or a functional fragment thereof. The invention further provides a nucleic acid encoding a butyrylcholinesterase variant containing the nucleic acid sequence SEQ ID NO: 147, or a functional fragment thereof. The invention further provides a nucleic acid encoding a butyrylcholinesterase variant containing the nucleic acid sequence SEQ ID NO: 149, or a functional fragment thereof. The invention further provides a nucleic acid encoding a butyrylcholinesterase variant containing the nucleic acid sequence SEQ ID NO: 151, or a functional fragment thereof. The invention further provides a nucleic acid encoding a butyrylcholinesterase variant containing the nucleic acid sequence SEQ ID NO: 153, or a functional fragment thereof. The invention further provides a nucleic acid encoding a butyrylcholinesterase variant containing the nucleic acid sequence SEQ ID NO: 155, or a functional fragment thereof. The invention further provides a nucleic acid encoding a butyrylcholinesterase variant containing the nucleic acid sequence SEQ ID NO: 157, or a functional fragment thereof. The invention further provides a nucleic acid encoding a butyrylcholinesterase variant containing the nucleic acid sequence SEQ ID NO: 159, or a functional fragment thereof. The invention further provides a nucleic acid encoding a butyrylcholinesterase variant containing the nucleic acid sequence SEQ ID NO: 161, or a functional fragment thereof. The invention further provides a nucleic acid encoding a butyrylcholinesterase variant containing the nucleic acid sequence SEQ ID NO: 163, or a functional fragment thereof. The invention further provides a nucleic acid encoding a butyrylcholinesterase variant containing the nucleic acid sequence SEQ ID NO: 165, or a functional fragment thereof. The invention further provides a nucleic acid encoding a butyrylcholinesterase variant containing the nucleic acid sequence SEQ ID NO: 167, or a functional fragment thereof. The invention further provides a nucleic acid encoding a butyrylcholinesterase variant containing the nucleic acid sequence SEQ ID NO: 169, or a functional fragment thereof. The invention further provides a nucleic acid encoding a butyrylcholinesterase variant containing the nucleic acid sequence SEQ ID NO: 171, or a functional fragment thereof. The invention further provides a nucleic acid encoding a butyrylcholinesterase variant containing the nucleic acid sequence SEQ ID NO: 173, or a functional fragment thereof. The invention further provides a nucleic acid encoding a butyrylcholinesterase variant containing the nucleic acid sequence SEQ ID NO: 175, or a functional fragment thereof. The invention further provides a nucleic acid encoding a butyrylcholinesterase variant containing the nucleic acid sequence SEQ ID NO: 177, or a functional fragment thereof. The invention further provides a nucleic acid encoding a butyrylcholinesterase variant containing the nucleic acid sequence SEQ ID NO: 179, or a functional fragment thereof. The invention further provides a nucleic acid encoding a butyrylcholinesterase variant containing the nucleic acid sequence SEQ ID NO: 181, or a functional fragment thereof. The invention further provides a nucleic acid encoding a butyrylcholinesterase variant containing the nucleic acid sequence SEQ ID NO: 183, or a functional fragment thereof. The invention further provides a nucleic acid encoding a butyrylcholinesterase variant containing the nucleic acid sequence SEQ ID NO: 185, or a functional fragment thereof. The invention further provides a nucleic acid encoding a butyrylcholinesterase variant containing the nucleic acid sequence SEQ ID NO: 187, or a functional fragment thereof. The invention further provides a nucleic acid encoding a butyrylcholinesterase variant containing the nucleic acid sequence SEQ ID NO: 189, or a functional fragment thereof. The invention further provides a nucleic acid encoding a butyrylcholinesterase variant containing the nucleic acid sequence SEQ ID NO: 191, or a functional fragment thereof. The invention further provides a nucleic acid encoding a butyrylcholinesterase variant containing the nucleic acid sequence SEQ ID NO: 193, or a functional fragment thereof. The invention further provides a nucleic acid encoding a butyrylcholinesterase variant containing the nucleic acid sequence SEQ ID NO: 195, or a functional fragment thereof.

[0054] Cholinesterases are ubiquitous, polymorphic carboxylase Type B enzymes capable of hydrolyzing the neurotransmitter acetylcholine and numerous ester-containing compounds. Two major cholinesterases are acetylcholinesterase and butyrylcholinesterase. Butyrylcholinesterase catalyzes the hydrolysis of a number of choline esters as shown:

[chemical structure]

[0055] Butyrylcholinesterase preferentially uses butyrylcholine and benzoylcholine as substrates. Butyrylcholinesterase is found in mammalian blood plasma, liver, pancreas, intestinal mucosa and the white matter of the central nervous system. The human gene encoding butyrylcholinesterase is located on chromosome 3 and over thirty naturally occurring genetic variations of butyrylcholinesterase are known. The butyrylcholinesterase polypeptide is 574 amino acids in length and encoded by 1,722 base pairs of coding sequence. Three naturally occurring butyrylcholinesterase variations are the atypical alleles referred to as A variant, the J variant and the K variant. The A variant has an D70G mutation and is rare (0.5% allelic frequency), while the J variant has a E497V mutation and has only been found in one family. The K variant has a point mutation at nucleotide 1615, which results in an A539T mutation and has an allelic frequency of around 12% in Caucasians.

[0056] In addition to the naturally-occurring human variations of butyrylcholinesterase, a number of species variations are known. The amino acid sequence of cat butyrylcholinesterase is 88% identical with human butyrylcholinesterase. Of the seventy amino acids that differ, three are located in the active site gorge and are termed A277L, P285L and F398I. Similarly, horse butyrylcholinesterase has three amino acid differences in the active site compared with human butyrylcholinesterase, which are A277V, P285L and F398I. The amino acid sequence of rat butyrylcholinesterase contains 6 amino acid differences in the active site gorge, which are A277K, V280L, T284S, P285I, L286R and V288I.

[0057] Naturally occurring human butyrylcholinesterase variations, species variations as well as recombinantly prepared mutations have previously been described by Xie et al., Molecular Pharmacology 55:83-91 (1999). A butyrylcholinesterase variant of the invention can be prepared by a variety of methods well known in the art. If desired, random mutagenesis can be performed to prepare a butyrylcholinesterase variant of the invention. Alternatively, as disclosed herein, random mutagenesis focused in discrete regions based on the information obtained from structural, biochemical and modeling methods described herein can be performed to target those amino acids predicted to be important for catalytic activity. For example, molecular modeling of a substrate in the active site of butyrylcholinesterase can be utilized to predict amino acid alterations that allow for higher catalytic efficiency based on a better fit between the enzyme and its substrate. In addition, molecular modeling can be used to predict amino acid alterations that decrease steric hinderance between the enzyme and substrate. Based on studies with cocaine as a substrate, residues predicted to be important for hydrolysis activity include 8 hydrophobic gorge residues and the catalytic triad residues. Furthermore, it is understood that amino acid alterations of residues important for the functional structure of a butyrylcholinesterase variant, which include the cysteine residues ⁶⁵CyS-⁹²Cys, ²⁵²Cys⁻²⁶³Cys, and ⁴⁰⁰Cys⁻⁵¹⁹Cys involved in intrachain disulfide bonds are generally not altered in the preparation of a butyrylcholinesterase variant that has hydrolysis activity.

[0058] Following mutagenesis of butyrylcholinesterase or a butyrylcholinesterase variant expression, purification and functional characterization of the butyrylcholinesterase variant can be performed by methods well known in the art.

[0059] A butyrylcholinesterase variant of the invention exhibits camptothecin conversion or hydrolysis activity. As disclosed herein, a butyrylcholinesterase variant of the invention can have enhanced camptothecin conversion or hydrolysis activity and can be used to treat cancer. A polypeptide having minor modifications compared to a butyrylcholinesterase variant of the invention is encompassed by the invention so long as equivalent camptothecin conversion or hydrolysis activity is retained. In addition, functional fragments of a butyrylcholinesterase variant that still retain some or all of the camptothecin conversion or hydrolysis activity of the parent butyrylcholinesterase variant are similarly included in the invention. Similarly, functional fragments of nucleic acids, which encode functional fragments of a butyrylcholinesterase variant of the invention are similarly encompassed by the invention.

[0060] A functional fragment of a butyrylcholinesterase or a butyrylcholinesterase variant of the invention can be prepared by recombinant methods involving expression of a nucleic acid molecule encoding the butyrylcholinesterase variant or functional fragment thereof, followed by isolation of the variant or functional fragment thereof by routine biochemical methods described herein. It is understood that functional fragments can also be prepared by enzymatic or chemical cleavage of the full length butyrylcholinesterase variant. Methods for enzymatic and chemical cleavage and for purification of the resultant peptide fragments are well known in the art (see, for example, Deutscher, Methods in Enzymology, Vol. 182, “Guide to Protein Purification,” San Diego: Academic Press, Inc. (1990), which is incorporated herein by reference).

[0061] Furthermore, functional fragments of a butyrylcholinesterase variant can be produced by chemical synthesis. If desired, such molecules can be modified to include D-stereoisomers, non-naturally occurring amino acids, and amino acid analogs and mimetics in order to optimize their functional activity, stability or bioavailability. Examples of modified amino acids and their uses are presented in Sawyer, Peptide Based Drug Design, ACS, Washington (1995) and Gross and Meienhofer, The Peptides: Analysis, Synthesis, Biology, Academic Press, Inc., New York (1983), both of which are incorporated herein by reference.

[0062] If desired, random segments of a butyrylcholinesterase variant can be prepared and tested in the assays described herein. A fragment having any desired boundaries and modifications compared to the amino acid sequence of the reference butyrylcholinesterase or butyrylcholinesterase variant of the invention can be prepared. Alternatively, available information obtained by the structural, biochemical and modeling methods described herein can be used to prepare only those fragments of a butyrylcholinesterase variant that are likely to retain the camptothecin conversion or hydrolysis activity of the parent variant. As described herein, residues predicted to be important for camptothecin conversion or hydrolysis activity include 8 hydrophobic gorge residues and the catalytic triad residues. Furthermore, residues important for the functional structure of a butyrylcholinesterase variant include the cysteine residues ⁶⁵Cys-⁹²Cys, ²⁵²CyS⁻²⁶³Cys, and ⁴⁰⁰Cys⁻⁵¹⁹Cys involved in intrachain disulfide bonds. A functional fragment can include non-peptidic structural elements that serve to mimic structurally or functionally important residues of the reference variant.

[0063] Also included as butyrylcholinesterase variants of the invention are fusion proteins that result from linking a butyrylcholinesterase variant or functional fragment thereof to a heterologous protein, such as a therapeutic protein, as well as fusion constructs of nucleic acids encoding such fusion proteins. Fragments of nucleic acids that can hybridize to a butyrylcholinesterase variant or functional fragment thereof are useful, for example, as hybridization probes and are also encompassed by the claimed invention.

[0064] The invention further provides butyrylcholinesterase variants, or functional fragment thereof, that contains an antibody or antibody fragment. A butyrylcholinesterase variant of the invention can be fused to any antibody or antibody fragment. For example, a butyrylcholinesterase variant of the invention can be fused to an antibody or antibody fragment that binds to a tumor-associated antigen. In this way the butyrylcholinesterase variant can be delivered directly to a tumor which can result in a decreased number of side effects. Several antigens are known to be over-expressed in tumor cells or expressed exclusively in tumor cells. These tumor associated antigens include, for example, Lewis Y (Siegall, C., Semin. Cancer Biol. 6:289-295 (1995)), carcinoembryonic antigen (CEA)(Watine et al., Dis. Colon Rectum 44:1791-1799 (2001)), tetraspanin L6 (Kaneko et al., Am. J. Gastroenterol. 96:3457-3458 (2001)), 17-1A (Indar et al., J.R. Coll. Surg. Edinb. 47:458-474 (2002)), mucin-1 (MUC-1) (Segal-Eiras and Croce, Allerg. Immunopath. 25:176-181 (1997)), epidermal growth factor receptor (EGFR) (Bookman, M., Semin. Oncol. 25:381-396 (1998)), cancer antigen 125 (CA 125) (Cherry and Vacchiano, Semin. Oncol. Nurs. 18:167-173 (2002)), p97 (Srivastava, P., Curr. Opin. Immunol. 3:654-658 (1991)), melanoma antigen gene (MAGE) (Barker and Salehi, J. Neurosci. Res. 67:705-712 (2002)), CD20 (Kosmas et al., Leukemia 16:2004-2015 (2002)), CD33 (Countouriotis et al., Stem Cells 20:215-229 (2002)), ganglioside GD2 (Ragupathi, G., Cancer Immunol. Imunother. 43:152-157 (1996)), and ganglioside GD3 (Ragupathi, G., supra (1996)).

[0065] A butyrylcholinesterase variant of the invention can be fused to an internalizing antibody or antibody fragment or a non-internalizing antibody or antibody fragment. When fused to a non-internalizing antibody or antibody fragment, the butyrylcholinesterase variant can be internalized through binding to a cell surface polypeptide that undergoes internalization. For example, a butyrylcholinesterase variant of the invention can be fused to an antibody directed to a receptor that undergoes internalization.

[0066] The invention provides a butyrylcholinesterase variant where the antibody or antibody fragment specifically binds a cell surface receptor. In one embodiment, the invention provides a butyrylcholinesterase variant where the antibody or antibody fragment specifically binds epidermal growth factor receptor (EGFR). The EGFR is known to be up-regulated in several tumor cell types, for example, in breast cancer cells. In various related embodiments, the invention provides a butyrylcholinesterase variant where the antibody or antibody fragment contains an amino acid sequence selected from a linker variant, hinge variant, and a synthetic linker variant. In one embodiment, the invention provides a butyrylcholinesterase variant where the antibody or antibody fragment contains an amino acid sequence as set forth in SEQ ID NOS: 18 and 20. ELISA results using a model antibody are shown in FIG. 7 and FIG. 8.

[0067] In a further embodiment, the invention provides a butyrylcholinesterase variant where the antibody or antibody fragment specifically binds CD20. CD20 is a non-glycosylated phosphoprotein on the B-cell surface. CD20-antibody complexes do not internalize, thereby allowing cell-surface bound immunoglobulin to interact with effector cells or complement for a longer time. In one embodiment, the invention provides a butyrylcholinesterase variant where the antibody or antibody fragment contains an amino acid sequence as set forth in SEQ ID NOS: 198 and 200, and specifically binds CD20. CD20 is known to be up-regulated in several tumor cell types, for example, B cell lymphomas such as Non-Hodgkin's lymphoma as well in various autoimmune conditions.

[0068] Fusions between a butyrylcholinesterase variant and an antibody or antibody fragment can be used for targeted tumor cell-specific butyrylcholoinesterase mediated toxicity using a process called antibody-directed enzyme prodrug therapy (ADEPT) (Jung, M., Mini Rev. Med. Chem. 1:399-407 (2001); Bagshawe, K. D., Mol. Med. Today 1:424-431 (1995); and Senter, P. D., FASEB J 4:188-193 (1990)). A related method called viral-directed enzyme prodrug therapy (VDEPT) can also be utilized. An example of a fusion between a butyrylcholinesterase variant and an antibody or antibody fragment that can be used for targeted tumor cell-specific butyrylcholoinesterase mediated toxicity is set forth as amino acid sequence designated SEQ ID NO: 202 and corresponding nucleotide sequence set forth as SEQ ID NO: 201, which corresponds to an anti-CD20 VH-CH1 hinge cys L530 BChE.4-1 heavy chain construct. The butyrylcholinesterase variant designated SEQ ID NO: 202 is a fusion protein that contains a heavy chain comprised of the anti-CD20 antibody variable heavy chain region with a cysteine-containing hinge region and the L530 functional fragment (SEQ ID NO: 204) of the butyrylcholinesterase variant designated SEQ ID NO: 180, which incorporates the 4-1 variant amino acids (H77F/F227A/P285NN331A). VDEPT uses a viral vector to deliver an enzyme such as a butyrylcholinesterase variant of the invention. With such approaches, selective expression of an enzyme can efficiently activate non-toxic or moderately toxic prodrugs in tumor cells into highly toxic metabolic products resulting in enhanced anti-tumor activity and an improved therapeutic index. In order for these approaches to be successful the enzyme needs to be of high activity, for example, the butyrylcholinesterase variants of the invention can be used.

[0069] The butyrylcholinesterase variants of the invention were derived from libraries as disclosed in Example I. A library that is sufficiently diverse to contain a butyrylcholinesterase variant with enhanced camptothecin conversion or hydrolysis activity can be prepared by a variety of methods well known in the art. Those skilled in the art will know what size and diversity is necessary or sufficient for the intended purpose. For example, a library of butyrylcholinesterase variants can be prepared that contains each of the 19 amino acids not found in the reference butyrylcholinesterase at each of the approximately 573 amino acid positions and screening the resultant variant library for butyrylcholinesterase variants with enhanced camptothecin hydrolysis activity.

[0070] Alternatively, a focused library can be prepared utilizing the structural, biochemical and modeling information relating to butyrylcholinesterase as described herein. It is understood that any information relevant to the determination or prediction of residues or regions important for camptothecin conversion or hydrolysis activity or structural function of butyrylcholinesterase can be useful in the design of a focused library of butyrylcholinesterase variants of the invention that have enhanced camptothecin hydrolysis activity. Thus, the butyrylcholinesterase variants that make up the library of butyrylcholinesterase variants of the invention can contain amino acid alterations at amino acid positions located in regions determined or predicted to be important for camptothecin conversion or hydrolysis activity. A focused library of butyrylcholinesterase variants can be desirable as it significantly decreases the number of variants that need to be screened in order to identify a butyrylcholinesterase variant with enhanced activity by targeting amino acid alterations to regions determined or predicted to be important for activity.

[0071] Regions important for camptothecin conversion or hydrolysis activity of butyrylcholinesterase can be determined or predicted through a variety of methods known in the art and used to focus the synthesis of a library of butyrylcholinesterase variants. Related enzymes such as, for example, acetylcholinesterase and carboxylesterase, that share a high degree of sequence similarity and have biochemically similar catalytic properties can provide information regarding the regions important for catalytic activity of butyrylcholinesterase. For example, structural modeling can reveal the active site of an enzyme, which is a three-dimensional structure such as a cleft, gorge or crevice formed by amino acid residues generally located apart from each other in primary structure. Therefore, amino acid residues that make up regions of butyrylcholinesterase important for camptothecin conversion or hydrolysis activity can include residues located along the active site gorge. For a description of structural modeling of butyrylcholinesterase, see for example, Harel et al., Proc. Nat. Acad. Sci. USA 89: 10827-10831 (1992) and Soreq et al., Trends Biochem. Sci. 17(9): 353-358 (1992), which are incorporated herein by reference.

[0072] In addition to structural modeling of butyrylcholinesterase, biochemical data can be used to determine or predict regions of butyrylcholinesterase important for camptothecin conversion or hydrolysis activity when preparing a focused library of butyrylcholiesterase variants. In this regard, the characterization of naturally occurring butyrylcholinesterase variants with altered camptothecin conversion or hydrolysis activity is useful for identifying regions important for the catalytic activity of butyrylcholinesterase. Similarly, site-directed mutagenesis studies can provide data regarding catalytically important amino acid residues as reviewed, for example, in Schwartz et al., Pharmac. Ther. 67: 283-322 (1992), which is incorporated by reference.

[0073] To generate a library of butyrylcholinesterase variants of the invention distinct types of information can be used alone or combined to determine or predict a region of an amino acid sequence of butyrylcholinesterase important for camptothecin conversion or hydrolysis activity. For example, information based on structural modeling and biochemical data is combined to determine a region of an amino acid sequence of butyrylcholinesterase important for camptothecin conversion or hydrolysis activity. Because information obtained by a variety of methods can be combined to predict the catalytically active regions, one skilled in the art will appreciate that the regions themselves represent approximations rather than strict confines. As a result, a library of butyrylcholinesterase can contain butyrylcholinesterase variants that have amino acid alterations outside of the regions determined or predicted to be important for camptothecin conversion or hydrolysis activity. Similarly, a butyrylcholinesterase variant of the invention can have amino acid alterations outside of the regions determined or predicted to be important for camptothecin conversion or hydrolysis activity. Furthermore, a butyrylcholinesterase variant of the invention can have any other modification that does not significantly change its camptothecin conversion or hydrolysis activity. It is further understood that the number of regions determined or predicted to be important for camptothecin conversion or hydrolysis activity can vary based on the predictive methods used.

[0074] Once a number of regions has been identified by any method appropriate for determination of regions important for camptothecin hydrolysis, or combination thereof, each region can be randomized across some or all amino acid positions to create a library of variants containing the wild-type amino acid plus one or more of the other nineteen naturally occurring amino acids at one or more positions within each of the regions. Seven regions of an amino acid sequence of butyrylcholinesterase selected for the focused library of butyrylcholinesterase variants provided by the invention are shown in Table 1.

TABLE 1
Butyrylcholinesterase Regions Predicted to be Important for
Catalytic Efficiency.

| Region | Location | Length |
|---|---|---|
| 1 | 68-82 | 15 |
| 2 | 110-121 | 12 |
| 3 | 194-201 | 8 |
| 4 | 224-234 | 11 |
| 5 | 277-289 | 13 |
| 6 | 327-332 | 6 |
| 7 | 429-442 | 14 |

[0075] Methods for preparing libraries containing diverse populations of various types of molecules such as peptides, peptoids and peptidomimetics are well known in the art (see, for example, Ecker and Crooke, Biotechnology 13:351-360 (1995), and Blondelle et al., Trends Anal. Chem. 14:83-92 (1995), and the references cited therein, each of which is incorporated herein by reference; see, also, Goodman and Ro, Peptidomimetics for Drug Design, in “Burger's Medicinal Chemistry and Drug Discovery” Vol. 1 (ed. M. E. Wolff; John Wiley & Sons 1995), pages 803-861, and Gordon et al., J. Med. Chem. 37:1385-1401 (1994), each of which is incorporated herein by reference). Where a molecule is a peptide, protein or fragment thereof, the molecule can be produced in vitro directly or can be expressed from a nucleic acid, which can be produced in vitro. Methods of synthetic peptide chemistry are well known in the art.

[0076] A library of butyrylcholinesterase variants can be produced, for example, by constructing a nucleic acid expression library encoding butyrylcholinesterase variants. Methods for producing such libraries are well known in the art (see, for example, Sambrook et al., Molecular Cloning: A Laboratory Manual (Cold Spring Harbor Laboratory Press 1989), which is incorporated herein by reference). A library of nucleic acids encoding butyrylcholinesterase variants can be composed of DNA, RNA or analogs thereof. A library containing RNA molecules can be constructed, for example, by synthesizing the RNA molecules chemically.

[0077] The generation of a library of nucleic acids encoding butyrylcholinesterase variants can be by any means desired by the user. Those skilled in the art will know what methods can be used to generate libraries of nucleic acids encoding butyrylcholinesterase variants. For example, butyrylcholinesterase variants can be generated by mutagenesis of nucleic acids encoding butyrylcholinesterase using methods well known to those skilled in the art (Molecular Cloning: A Laboratory Manual, Sambrook et al., eds., Cold Spring Harbor Press, Plainview, N.Y. (1989)). A library of nucleic acids encoding butyrylcholinesterase variants of the invention can be randomized to be sufficiently diverse to contain nucleic acids encoding every possible naturally occurring amino acid at each amino acid position of butyrylcholinesterase. Alternatively, a library of nucleic acids can be prepared such that it contains nucleic acids encoding every possible naturally occurring amino acid at each amino acid only at positions located within a region of butyrylcholinesterase predicted or determined to be important for camptothecin conversion or hydrolysis activity.

[0078] One or more mutations can be introduced into a nucleic acid molecule encoding a butyrylcholinesterase variant to yield a modified nucleic acid molecule using, for example, site-directed mutagenesis (see Wu (Ed.), Meth. In Enzymol. Vol. 217, San Diego: Academic Press (1993); Higuchi, “Recombinant PCR” in Innis et al. (Ed.), PCR Protocols, San Diego: Academic Press, Inc. (1990), each of which is incorporated herein by reference). Such mutagenesis can be used to introduce a specific, desired amino acid alteration. Thus, distinct libraries containing amino acid alterations in one or more of the regions determined to be important for camptothecin conversion or hydrolysis activity as well as a single library containing mutations in several or all of the regions can be prepared.

[0079] The efficient synthesis and expression of libraries of butyrylcholinesterase variants using oligonucleotide-directed mutagenesis can be accomplished as previously described by Wu et al., Proc. Natl. Acad. Sci. USA, 95:6037-6042 (1998); Wu et al., J. Mol. Biol., 294:151-162 (1999); and Kunkel, Proc. Natl. Acad. Sci. USA, 82:488-492 (1985), which are incorporated herein by reference. Oligonucleotide-directed mutagenesis is a well-known and efficient procedure for systematically introducing mutations, independent of their phenotype and is, therefore, ideally suited for directed evolution approaches to protein engineering. To perform oligonucleotide-directed mutagenesis a library of nucleic acids encoding the desired mutations is hybridized to single-stranded uracil-containing template of the wild-type sequence. The methodology is flexible, permitting precise mutations to be introduced without the use of restriction enzymes, and is relatively inexpensive if oligonucleotides are synthesized using codon-based mutagenesis.

[0080] Codon-based synthesis or mutagenesis represents one method well known in the art for avoiding genetic redundancy while rapidly and efficiently producing a large number of alterations in a known amino acid sequence or for generating a diverse population of random sequences. This method is the subject matter of U.S. Pat. Nos. 5,264,563 and 5,523,388 and is also described in Glaser et al. J. Immunology 149:3903-3913 (1992). Briefly, coupling reactions for the randomization of, for example, all twenty codons which specify the amino acids of the genetic code are performed in separate reaction vessels and randomization for a particular codon position occurs by mixing the products of each of the reaction vessels. Following mixing, the randomized reaction products corresponding to codons encoding an equal mixture of all twenty amino acids are then divided into separate reaction vessels for the synthesis of each randomized codon at the next position. If desired, equal frequencies of all twenty amino acids can be achieved with twenty vessels that contain equal portions of the twenty codons. Thus, it is possible to utilize this method to generate random libraries of the entire sequence of butyrylcholinesterase or focused libraries of the regions determined or predicted to be important for camptothecin conversion or hydrolysis activity.

[0081] Variations to the above synthesis method also exist and include, for example, the synthesis of predetermined codons at desired positions and the biased synthesis of a predetermined sequence at one or more codon positions as described by Wu et al, supra, 1998. Biased synthesis involves the use of two reaction vessels where the predetermined or parent codon is synthesized in one vessel and the random codon sequence is synthesized in the second vessel. The second vessel can be divided into multiple reaction vessels such as that described above for the synthesis of codons specifying totally random amino acids at a particular position. Alternatively, a population of degenerate codons can be synthesized in the second reaction vessel such as through the coupling of NNG/T nucleotides or NNX/X where N is a mixture of all four nucleotides. Following synthesis of the predetermined and random codons, the reaction products in each of the two reaction vessels are mixed and then redivided into an additional two vessels for synthesis at the next codon position.

[0082] A modification to the above-described codon-based synthesis for producing a diverse number of variant sequences can similarly be employed for the production of the libraries of butyrylcholinesterase variants described herein. This modification is based on the two vessel method described above which biases synthesis toward the parent sequence and allows the user to separate the variants into populations containing a specified number of codon positions that have random codon changes.

[0083] Briefly, this synthesis is performed by continuing to divide the reaction vessels after the synthesis of each codon position into two new vessels. After the division, the reaction products from each consecutive pair of reaction vessels, starting with the second vessel, is mixed. This mixing brings together the reaction products having the same number of codon positions with random changes. Synthesis proceeds by then dividing the products of the first and last vessel and the newly mixed products from each consecutive pair of reaction vessels and redividing into two new vessels. In one of the new vessels, the parent codon is synthesized and in the second vessel, the random codon is synthesized. For example, synthesis at the first codon position entails synthesis of the parent codon in one reaction vessel and synthesis of a random codon in the second reaction vessel. For synthesis at the second codon position, each of the first two reaction vessels is divided into two vessels yielding two pairs of vessels. For each pair, a parent codon is synthesized in one of the vessels and a random codon is synthesized in the second vessel. When arranged linearly, the reaction products in the second and third vessels are mixed to bring together those products having random codon sequences at single codon positions. This mixing also reduces the product populations to three, which are the starting populations for the next round of synthesis. Similarly, for the third, fourth and each remaining position, each reaction product population for the preceding position are divided and a parent and random codon synthesized.

[0084] Following the above modification of codon-based synthesis, populations containing random codon changes at one, two, three and four positions as well as others can be conveniently separated out and used based on the need of the individual. Moreover, this synthesis scheme also allows enrichment of the populations for the randomized sequences over the parent sequence since the vessel containing only the parent sequence synthesis is similarly separated out from the random codon synthesis.

[0085] This method can be used to synthesize a library of nucleic acids encoding butyrylcholinesterase variants having amino acid alterations in one or more regions of butyrylcholinesterase predicted to be important for camptothecin conversion or hydrolysis activity.

[0086] Alternatively, a library of nucleic acids encoding butyrylcholinesterase variants can also be generated using gene shuffling. Gene shuffling or DNA shuffling is a method for directed evolution that generates diversity by recombination (see, for example, Stemmer, Proc. Natl. Acad. Sci. USA 91:10747-10751 (1994); Stemmer, Nature 370:389-391 (1994); Crameri et al., Nature 391:288-291 (1998); Stemmer et al., U.S. Pat. No. 5,830,721, issued Nov. 3, 1998). Gene shuffling or DNA shuffling is a method using in vitro homologous recombination of pools of selected mutant genes. For example, a pool of point mutants of a particular gene can be used. The genes are randomly fragmented, for example, using DNase, and reassembled by PCR. If desired, DNA shuffling can be carried out using homologous genes from different organisms to generate diversity (Crameri et al., supra, 1998). The fragmentation and reassembly can be carried out in multiple rounds, if desired. The resulting reassembled genes constitute a library of butyrylcholinesterase variants that can be used in the invention compositions and methods.

[0087] The invention library of nucleic acids encoding butyrylcholinesterase variants can be expressed in a variety of eukaryotic cells. For example, the nucleic acids can be expressed in mammalian cells, insect cells, plant cells, and non-yeast fungal cells. Mammalian cell lines useful for expressing the invention library of nucleic acids encoding butyrylcholinesterase variants include, for example, Chinese Hamster Ovary (CHO), human 293T and Human NIH 3T3 cell lines. Expression of the invention library of nucleic acids encoding butyrylcholinesterase variants can be achieved by both stable or transient cell transfection (see Example III, Table 5).

[0088] The incorporation of variant nucleic acids or heterologous nucleic acid fragments at an identical site in the genome functions to create isogenic cell lines that differ only in the expression of a particular variant or heterologous nucleic acid. Incorporation at a single site minimizes positional effects from integration at multiple sites in a genome that affect transcription of the mRNA encoded by the nucleic acid and complications from the incorporation of multiple copies or expression of more than one nucleic acid species per cell. Techniques known in the art that can be used to target a variant or a heterologous nucleic acid to a specific location in the genome include, for example, homologous recombination, retroviral targeting and recombinase-mediated targeting.

[0089] One approach for targeting variant or heterologous nucleic acids to a single site in the genome uses Cre recombinase to target insertion of exogenous DNA into the eukaryotic genome at a site containing a site specific recombination sequence (Sauer and Henderson, Proc. Natl. Acad. Sci. USA, 85:5166-5170 (1988); Fukushige and Sauer, Proc. Natl. Acad. Sci. U.S.A. 89:7905-7909 (1992); Bethke and Sauer, Nuc. Acids Res., 25:2828-2834 (1997)). In addition to Cre recombinase, Flp recombinase can also be used to target insertion of exogenous DNA into a particular site in the genome (Dymecki, Proc. Natl. Acad. Sci. U.S.A. 93:6191-6196 (1996)). It is understood that any combination of site-specific recombinase and corresponding recombination site can be used in methods of the invention to target a nucleic acid to a particular site in the genome.

[0090] A suitable recombinase can be encoded on a vector that is co-transfected with a vector containing a nucleic acid encoding a butyrylcholinesterase variant. Alternatively, the expression element of a recombinase can be incorporated into the same vector expressing a nucleic acid encoding a butyrylcholinesterase variant. In addition to simultaneously transfecting the nucleic acid encoding a recombinase with the nucleic acids encoding a butyrylcholinesterase variant, a vector encoding the recombinase can be transfected into a cell, and the cells can be selected for expression of recombinase. A cell stably expressing the recombinase can subsequently be transfected with nucleic acids encoding variant nucleic acids.

[0091] The precise site-specific DNA recombination mediated by Cre recombinase can be used to create stable mammalian transformants containing a single copy of exogenous DNA encoding a butyrylcholinesterase variant. As exemplified below, the frequency of Cre-mediated targeting events can be enhanced substantially using a modified doublelox strategy. The doublelox strategy is based on the observation that certain nucleotide changes within the core region of the lox site alter the site selection specificity of Cre-mediated recombination with little effect on the efficiency of recombination (Hoess et al., Nucleic Acids Res. 14:2287-2300 (1986)). Incorporation of loxP and an altered loxP site, termed lox511, in both the targeting vector and the host cell genome results in site-specific recombination by a double crossover event. The doublelox approach increases the recovery of site-specific integrants by 20-fold over the single crossover insertional recombination, increasing the absolute frequency of site-specific recombination such that it exceeds the frequency of illegitimate recombination (Bethke and Sauer, Nuc. Acids Res., 25:2828-2834 (1997)).

[0092] Following the expression of a library of butyrylcholinesterase variants in a mammalian cell line, randomly selected clones can be sequenced and screened for increased catalytic activity. Methods for sequencing selected clones are well known to those of skill in the art and are described, for example, in Sambrook et al., supra, 1992, and in Ansubel et al., supra 1998. Selecting a suitable method for measuring the camptothecin conversion or hydrolysis activity of a butyrylcholinesterase variant depends on a variety of factors such as, for example, the amount of the butyrylcholinesterase variant that is available. The camptothecin conversion or hydrolysis activity of a butyrylcholinesterase variant can be measured, for example, by spectrophotometry, by a microtiter-based assay utilizing a polyclonal anti-butyrylcholinesterase antibody to uniformly capture the butyrylcholinesterase variants and by high-performance liquid chromatography (HPLC).

[0093] Enhanced camptothecin conversion or hydrolysis activity of a butyrylcholinesterase variant compared to butyrylcholinesterase can be determined by a comparison of catalytic efficiencies as determined using assays known in the art and described herein. For example, the camptothecin conversion or hydrolysis activity of a butyrylcholinesterase variant can be determined using an o-nitrophenyl acetate hydrolysis assay (see Example 11), a CPT-11 conversion to SN-38 HPLC assay (see Example III), or a cytotoxicity assay (see Example IV). To ensure that a library of butyrylcholinesterase variants has been screened exhaustively, screening of each library can be continued until clones encoding identical butyrylcholinesterase amino acid alterations have been identified on multiple occasions.

[0094] Clones expressing a butyrylcholinesterase variant with increased camptothecin hydrolysis activity can be used to established larger-scale cultures suitable for purifying larger quantities of the butyrylcholinesterase. A butyrylcholinesterase variant of interest can be cloned into an expression vector and used to transfect a cell line, which can subsequently be expanded. Those skilled in the art will know what type of expression vector is suitable for a particular application. A butyrylcholinesterase variant exhibiting increased camptothecin conversion or hydrolysis activity can be cloned, for example, into an expression vector carrying a gene that confers resistance to a particular chemical agent to allow positive selection of the transfected cells. An expression vector suitable for transfection of, for example, mammalian cell lines can contain a promoter such as the cytomegalovirus (CMV) promoter for selection in mammalian cells. As described herein, a butyrylcholinesterase variant can be cloned into a mammalian expression vector and transiently transfected into human 293T cells. Expression vectors suitable for expressing a butyrylcholinesterase variant are well known in the art and commercially available.

[0095] Clones expressing butyrylcholinesterase variants can be selected and tested for camptothecin conversion or hydrolysis activity. Cells carrying clones exhibiting enhanced camptothecin conversion or hydrolysis activity can be expanded by routine cell culture systems to produce larger quantities of a butyrylcholinesterase variant of interest. The concentrated recombinant butyrylcholinesterase variant can be harvested and purified by methods well known in the art and described, for example, by Masson et al., Biochemistry 36: 2266-2277 (1997), which is incorporated herein by reference.

[0096] A butyrylcholinesterase variant having an increased serum half-life can be useful for testing a butyrylcholinesterase variant in a subject or treating cancer in an individual. Useful methods for increasing the serum half-life of a butyrylcholinesterase variant include, for example, conversion of the butyrylcholinesterase variant into a tetramer, covalently attaching synthetic and natural polymers such as polyethylene glycol (PEG) and dextrans to the truncated butyrylcholinesterase variant, liposome formulations, or expression of the enzyme as an Ig-fusion protein. As disclosed herein, conversion of a butyrylcholinesterase variant into a tetramer can be achieved by co-transfecting the host cell line with the COLQ gene as well as by addition of poly-L-proline to the media of transfected cells. These and other methods known in the art for increasing the serum half-life of a butyrylcholinesterase variant are useful for testing a butyrylcholinesterase variant in an animal subject or treating cancer in an individual.

[0097] The invention provides a method of converting a camptothecin derivative to a topoisomerase inhibitor by contacting the camptothecin derivative with a butyrylcholinesterase variant selected from SEQ ID NOS: 2, 4, 6, 8, 10, 12, 14, 24, 26, 28, 30, 32, 34, 36, 38, 40, 42, 44, 46, 48, 50, 52, 54, 56, 58, 60, 62, 64, 66, 68, 70, 72, 74, 76, 78, 80, 82, 84, 86, 88, 90, 92, 94, 96, 98, 100, 102, 104, 106, 108, 110, 112, 114, 116, 118, 120, 122, 124, 126, 128, 130, 132, 134, 136, 138, 140, 142, 144, 146, 148, 150, 152, 154, 156, 158, 160, 162, 164, 166, 168, 170, 172, 174, 176, 178, 180, 182, 184, 186, 188, 190, 192, 194, and 196, or functional fragment thereof, under conditions that allow conversion of a camptothecin derivative to a topoisomerase inhibitor. In one embodiment the topoisomerase inhibitor is SN-38. In a further embodiment the camptothecin derivative is CPT-11. In one embodiment, the butyrylcholinesterase variant exhibits a two-fold or greater increase in conversion capability compared to butyrylcholinesterase, a ten-fold or greater increase in conversion capability compared to butyrylcholinesterase or a fifty-fold or more enhanced conversion capability compared to butyrylcholinesterase, a one hundred-fold or more enhanced conversion capability compared to butyrylcholinesterase, a two hundred-fold or more enhanced conversion capability compared to butyrylcholinesterase, a three hundred-fold or more enhanced conversion capability compared to butyrylcholinesterase. a four hundred-fold or more enhanced conversion capability compared to butyrylcholinesterase, a five hundred-fold or more enhanced conversion capability compared to butyrylcholinesterase, a one thousand-fold or more enhanced conversion capability compared to butyrylcholinesterase, a fifteen hundred-fold or more enhanced conversion capability compared to butyrylcholinesterase, a two thousand-fold or more enhanced conversion capability compared to butyrylcholinesterase, a three thousand-fold or more enhanced conversion capability compared to butyrylcholinesterase.

[0098] In one embodiment, the invention provides a method of converting a camptothecin derivative to a topoisomerase inhibitor by contacting the camptothecin derivative with a butyrylcholinesterase variant having the sequence as shown in SEQ ID NOS: 2, 4, 6, 8, 10, 12, 14, 24, 26, 28, 30, 32, 34, 36, 38, 40, 42, 44, 46, 48, 50, 52, 54, 56, 58, 60, 62, 64, 66, 68, 70, 72, 74, 76, 78, 80, 82, 84, 86, 88, 90, 92, 94, 96, 98, 100, 102, 104, 106, 108, 110, 112, 114, 116, 118, 120, 122, 124, 126, 128, 130, 132, 134, 136, 138, 140, 142, 144, 146, 148, 150, 152, 154, 156, 158, 160, 162, 164, 166, 168, 170, 172, 174, 176, 178, 180, 182, 184, 186, 188, 190, 192, 194, and 196, or functional fragment thereof, under conditions that allow conversion of a camptothecin derivative to a topoisomerase inhibitor. For example, in one embodiment the invention provides a method of converting a camptothecin derivative to a topoisomerase inhibitor by contacting the camptothecin derivative with a butyrylcholinesterase variant having the amino acid sequence as shown in SEQ ID) NO: 2, or functional fragment thereof, under conditions that allow conversion of a camptothecin derivative to a topoisomerase inhibitor. In another embodiment, the butyrylcholinesterase variant has the amino acid sequence as shown in SEQ ID NO: 4, or functional fragment thereof. In a further embodiment, the butyrylcholinesterase variant has the amino acid sequence as shown in SEQ ID NO: 6, or functional fragment thereof. In a still further embodiment, the butyrylcholinesterase variant has the amino acid sequence as shown in SEQ ID NO: 8, or functional fragment thereof. In another embodiment, the butyrylcholinesterase variant has the amino acid sequence as shown in SEQ ID NO: 10, or functional fragment thereof. In a further embodiment, the butyrylcholinesterase variant has the amino acid sequence as shown in SEQ ID NO: 12, or functional fragment thereof. In another embodiment, the butyrylcholinesterase variant has the amino acid sequence as shown in SEQ ID NO: 14, or functional fragment thereof. In another embodiment, the butyrylcholinesterase variant has the amino acid sequence as shown in SEQ ID NO: 24, or functional fragment thereof. In another embodiment, the butyrylcholinesterase variant has the amino acid sequence as shown in SEQ ID NO: 26, or functional fragment thereof. In another embodiment, the butyrylcholinesterase variant has the amino acid sequence as shown in SEQ ID NO: 28, or functional fragment thereof. In another embodiment, the butyrylcholinesterase variant has the amino acid sequence as shown in SEQ ID NO: 30, or functional fragment thereof. In another embodiment, the butyrylcholinesterase variant has the amino acid sequence as shown in SEQ ID NO: 32, or functional fragment thereof. In another embodiment, the butyrylcholinesterase variant has the amino acid sequence as shown in SEQ ID NO: 34, or functional fragment thereof. In another embodiment, the butyrylcholinesterase variant has the amino acid sequence as shown in SEQ ID NO: 36, or functional fragment thereof. In another embodiment, the butyrylcholinesterase variant has the amino acid sequence as shown in SEQ ID NO: 38, or functional fragment thereof. In another embodiment, the butyrylcholinesterase variant has the amino acid sequence as shown in SEQ ID NO: 40, or functional fragment thereof. In another embodiment, the butyrylcholinesterase variant has the amino acid sequence as shown in SEQ ID NO: 42, or functional fragment thereof. In another embodiment, the butyrylcholinesterase variant has the amino acid sequence as shown in SEQ ID NO: 44, or functional fragment thereof. In another embodiment, the butyrylcholinesterase variant has the amino acid sequence as shown in SEQ ID NO: 46, or functional fragment thereof. In another embodiment, the butyrylcholinesterase variant has the amino acid sequence as shown in SEQ ID NO: 48, or functional fragment thereof. In another embodiment, the butyrylcholinesterase variant has the amino acid sequence as shown in SEQ ID NO: 50, or functional fragment thereof. In another embodiment, the butyrylcholinesterase variant has the amino acid sequence as shown in SEQ ID NO: 52, or functional fragment thereof. In another embodiment, the butyrylcholinesterase variant has the amino acid sequence as shown in SEQ ID NO: 54, or functional fragment thereof. In another embodiment, the butyrylcholinesterase variant has the amino acid sequence as shown in SEQ ID NO: 56, or functional fragment thereof. In another embodiment, the butyrylcholinesterase variant has the amino acid sequence as shown in SEQ ID NO: 58, or functional fragment thereof. In another embodiment, the butyrylcholinesterase variant has the amino acid sequence as shown in SEQ ID NO: 60, or functional fragment thereof. In another embodiment, the butyrylcholinesterase variant has the amino acid sequence as shown in SEQ ID NO: 62, or functional fragment thereof. In another embodiment, the butyrylcholinesterase variant has the amino acid sequence as shown in SEQ ID NO: 64, or functional fragment thereof. In another embodiment, the butyrylcholinesterase variant has the amino acid sequence as shown in SEQ ID NO: 66, or functional fragment thereof. In another embodiment, the butyrylcholinesterase variant has the amino acid sequence as shown in SEQ ID NO: 68, or functional fragment thereof. In another embodiment, the butyrylcholinesterase variant has the amino acid sequence as shown in SEQ ID NO: 70, or functional fragment thereof. In another embodiment, the butyrylcholinesterase variant has the amino acid sequence as shown in SEQ ID NO: 72, or functional fragment thereof. In another embodiment, the butyrylcholinesterase variant has the amino acid sequence as shown in SEQ ID NO: 74, or functional fragment thereof. In another embodiment, the butyrylcholinesterase variant has the amino acid sequence as shown in SEQ ID NO: 76, or functional fragment thereof. In another embodiment, the butyrylcholinesterase variant has the amino acid sequence as shown in SEQ ID NO: 78, or functional fragment thereof. In another embodiment, the butyrylcholinesterase variant has the amino acid sequence as shown in SEQ ID NO: 80, or functional fragment thereof. In another embodiment, the butyrylcholinesterase variant has the amino acid sequence as shown in SEQ ID NO: 82, or functional fragment thereof. In another embodiment, the butyrylcholinesterase variant has the amino acid sequence as shown in SEQ ID NO: 84, or functional fragment thereof. In another embodiment, the butyrylcholinesterase variant has the amino acid sequence as shown in SEQ ID NO: 86, or functional fragment thereof. In another embodiment, the butyrylcholinesterase variant has the amino acid sequence as shown in SEQ ID NO: 88, or functional fragment thereof. In another embodiment, the butyrylcholinesterase variant has the amino acid sequence as shown in SEQ ID NO: 90, or functional fragment thereof. In another embodiment, the butyrylcholinesterase variant has the amino acid sequence as shown in SEQ ID NO: 92, or functional fragment thereof. In another embodiment, the butyrylcholinesterase variant has the amino acid sequence as shown in SEQ ID NO: 94, or functional fragment thereof. In another embodiment, the butyrylcholinesterase variant has the amino acid sequence as shown in SEQ ID NO: 96, or functional fragment thereof. In another embodiment, the butyrylcholinesterase variant has the amino acid sequence as shown in SEQ ID NO: 98, or functional fragment thereof. In another embodiment, the butyrylcholinesterase variant has the amino acid sequence as shown in SEQ ID NO: 100, or functional fragment thereof. In another embodiment, the butyrylcholinesterase variant has the amino acid sequence as shown in SEQ ID NO: 102, or functional fragment thereof. In another embodiment, the butyrylcholinesterase variant has the amino acid sequence as shown in SEQ ID NO: 104, or functional fragment thereof. In another embodiment, the butyrylcholinesterase variant has the amino acid sequence as shown in SEQ ID NO: 106, or functional fragment thereof. In another embodiment, the butyrylcholinesterase variant has the amino acid sequence as shown in SEQ ID NO: 108, or functional fragment thereof. In another embodiment, the butyrylcholinesterase variant has the amino acid sequence as shown in SEQ ID NO: 110, or functional fragment thereof. In another embodiment, the butyrylcholinesterase variant has the amino acid sequence as shown in SEQ ID NO: 112, or functional fragment thereof. In another embodiment, the butyrylcholinesterase variant has the amino acid sequence as shown in SEQ ID NO: 114, or functional fragment thereof. In another embodiment, the butyrylcholinesterase variant has the amino acid sequence as shown in SEQ ID NO: 116, or functional fragment thereof. In another embodiment, the butyrylcholinesterase variant has the amino acid sequence as shown in SEQ ID NO: 118, or functional fragment thereof. In another embodiment, the butyrylcholinesterase variant has the amino acid sequence as shown in SEQ ID NO: 120, or functional fragment thereof. In another embodiment, the butyrylcholinesterase variant has the amino acid sequence as shown in SEQ ID NO: 122, or functional fragment thereof. In another embodiment, the butyrylcholinesterase variant has the amino acid sequence as shown in SEQ ID NO: 124, or functional fragment thereof. In another embodiment, the butyrylcholinesterase variant has the amino acid sequence as shown in SEQ ID NO: 126, or functional fragment thereof. In another embodiment, the butyrylcholinesterase variant has the amino acid sequence as shown in SEQ ID NO: 128, or functional fragment thereof. In another embodiment, the butyrylcholinesterase variant has the amino acid sequence as shown in SEQ ID NO: 130, or functional fragment thereof. In another embodiment, the butyrylcholinesterase variant has the amino acid sequence as shown in SEQ ID NO: 132, or functional fragment thereof. In another embodiment, the butyrylcholinesterase variant has the amino acid sequence as shown in SEQ ID NO: 134, or functional fragment thereof. In another embodiment, the butyrylcholinesterase variant has the amino acid sequence as shown in SEQ ID NO: 136, or functional fragment thereof. In another embodiment, the butyrylcholinesterase variant has the amino acid sequence as shown in SEQ ID NO: 138, or functional fragment thereof. In another embodiment, the butyrylcholinesterase variant has the amino acid sequence as shown in SEQ ID NO: 140, or functional fragment thereof. In another embodiment, the butyrylcholinesterase variant has the amino acid sequence as shown in SEQ ID NO: 142, or functional fragment thereof. In another embodiment, the butyrylcholinesterase variant has the amino acid sequence as shown in SEQ ID NO: 144, or functional fragment thereof. In another embodiment, the butyrylcholinesterase variant has the amino acid sequence as shown in SEQ ID NO: 146, or functional fragment thereof. In another embodiment, the butyrylcholinesterase variant has the amino acid sequence as shown in SEQ ID NO: 148, or functional fragment thereof. In another embodiment, the butyrylcholinesterase variant has the amino acid sequence as shown in SEQ ID NO: 150, or functional fragment thereof. In another embodiment, the butyrylcholinesterase variant has the amino acid sequence as shown in SEQ ID NO: 152, or functional fragment thereof. In another embodiment, the butyrylcholinesterase variant has the amino acid sequence as shown in SEQ ID NO: 154, or functional fragment thereof. In another embodiment, the butyrylcholinesterase variant has the amino acid sequence as shown in SEQ ID NO: 156, or functional fragment thereof. In another embodiment, the butyrylcholinesterase variant has the amino acid sequence as shown in SEQ ID NO: 158, or functional fragment thereof. In another embodiment, the butyrylcholinesterase valiant has the amino acid sequence as shown in SEQ ID NO: 160, or functional fragment thereof. In another embodiment, the butyrylcholinesterase variant has the amino acid sequence as shown in SEQ ID NO: 162, or functional fragment thereof. In another embodiment, the butyrylcholinesterase variant has the amino acid sequence as shown in SEQ ID NO: 164, or functional fragment thereof. In another embodiment, the butyrylcholinesterase variant has the amino acid sequence as shown in SEQ ID NO: 166, or functional fragment thereof. In another embodiment, the butyrylcholinesterase variant has the amino acid sequence as shown in SEQ ID NO: 168, or functional fragment thereof. In another embodiment, the butyrylcholinesterase variant has the amino acid sequence as shown in SEQ ID NO: 170, or functional fragment thereof. In another embodiment, the butyrylcholinesterase variant has the amino acid sequence as shown in SEQ ID NO: 172, or functional fragment thereof. In another embodiment, the butyrylcholinesterase variant has the amino acid sequence as shown in SEQ ID NO: 174, or functional fragment thereof. In another embodiment, the butyrylcholinesterase variant has the amino acid sequence as shown in SEQ ID NO: 178, or functional fragment thereof. In another embodiment, the butyrylcholinesterase variant has the amino acid sequence as shown in SEQ ID NO: 180, or functional fragment thereof. In another embodiment, the butyrylcholinesterase variant has the amino acid sequence as shown in SEQ ID NO: 182, or functional fragment thereof. In another embodiment, the butyrylcholinesterase variant has the amino acid sequence as shown in SEQ ID NO: 184, or functional fragment thereof. In another embodiment, the butyrylcholinesterase variant has the amino acid sequence as shown in SEQ ID NO: 186, or functional fragment thereof. In another embodiment, the butyrylcholinesterase variant has the amino acid sequence as shown in SEQ ID NO: 188, or functional fragment thereof. In another embodiment, the butyrylcholinesterase variant has the amino acid sequence as shown in SEQ ID NO: 190, or functional fragment thereof. In another embodiment, the butyrylcholinesterase variant has the amino acid sequence as shown in SEQ ID NO: 192, or functional fragment thereof. In another embodiment, the butyrylcholinesterase variant has the amino acid sequence as shown in SEQ ID NO: 194, or functional fragment thereof. In another embodiment, the butyrylcholinesterase variant has the amino acid sequence as shown in SEQ ID NO: 196, or functional fragment thereof.

[0099] The invention also provides a method of converting a paxlitaxel prodrug to a paxlitaxel by contacting the paxlitaxel prodrug with a butyrylcholinesterase variant selected from SEQ ID NOS: 2, 4, 6, 8, 10, 12, 14, 24, 26, 28, 30, 32, 34, 36, 38, 40, 42, 44, 46, 48, 50, 52, 54, 56, 58, 60, 62, 64, 66, 68, 70, 72, 74, 76, 78, 80, 82, 84, 86, 88, 90, 92, 94, 96, 98, 100, 102, 104, 106, 108, 110, 112, 114, 116, 118, 120, 122, 124, 126, 128, 130, 132, 134, 136, 138, 140, 142, 144, 146, 148, 150, 152, 154, 156, 158, 160, 162, 164, 166, 168, 170, 172, 174, 176, 178, 180, 182, 184, 186, 188, 190, 192, 194, and 196, or functional fragment thereof, under conditions that allow conversion of a paxlitaxel prodrug to paxlitaxel. In one embodiment, the butyrylcholinesterase variant exhibits a two-fold or greater increase in conversion capability compared to butyrylcholinesterase, a ten-fold or greater increase in conversion capability compared to butyrylcholinesterase, a fifty-fold or more enhanced conversion capability compared to butyrylcholinesterase, a one hundred-fold or more enhanced conversion capability compared to butyrylcholinesterase, a two hundred-fold or more enhanced conversion capability compared to butyrylcholinesterase, a three hundred-fold or more enhanced conversion capability compared to butyrylcholinesterase, a four hundred-fold or more enhanced conversion capability compared to butyrylcholinesterase, a five hundred-fold or more enhanced conversion capability compared to butyrylcholinesteras, a one thousand-fold or more enhanced conversion capability compared to butyrylcholinesterase, a fifteen hundred-fold or more enhanced conversion capability compared to butyrylcholinesterase, a two thousand-fold or more enhanced conversion capability compared to butyrylcholinesterase, a three thousand-fold or more enhanced conversion capability compared to butyrylcholinesterase.

[0100] Paclitaxel prodrugs such as paclitaxel-2-ethylcarbonate (PC) have significant levels of antitumor activities in rodent models of human cancers. Paclitaxel (also known as TAXOL) was originally isolated from the bark of the Pacific yew tree and has been used in the treatment of several cancers including, for example, breast cancer, ovarian cancer, non-small cell lung cancer and Kaposi's sarcoma. The mechanism of action of this class of chemotherapeutic agents is the stabilization of tubulin. Serum carboxylesterases such as rat carboxylesterase has been shown to convert paclitaxel prodrugs, such as PC, to paxlitaxel. These serum carboxylesterases enhance the cytotoxic activity of PC on lung carcinoma and melanoma cell lines (Senter et al., Cancer Res. 56:1471-1474 (1996)). Butyrylcholinesterase and butyrylcholinesterase variants of the invention can be used to convert paclitaxel prodrugs such as PC into active drugs useful for the treatment of cancer.

[0101] As described herein, a butyrylcholinesterase variant exhibiting increased camptothecin conversion or hydrolysis activity can convert or hydrolyze a substrate, such as a camptothecin derivative or paclitaxel, in vitro as well as in vivo. For example, a camptothecin derivative butyrylcholinesterase substrate can be contacted with a butyrylcholinesterase variant of the invention in vitro by adding the substrate to supernatant isolated from cultures of butyrylcholinesterase variant library clones. Alternatively, the butyrylcholinesterase variant can be purified prior to being contacted by the substrate. Appropriate medium conditions in which to contact a substrate such as a camptothecin derivative substrate with a butyrylcholinesterase variant of the invention are readily determined by those skilled in the art. As described below, butyrylcholinesterase variants from culture supernatants can further be immobilized using a capture agent, such as an antibody prior to being contacted with a substrate, which allows for removal of culture supernatant components and enables contacting of the immobilized variants with substrate in the absence of contaminants. Following contacting of a butyrylcholinesterase variant of the invention with a substrate, an activity of the variant enzyme can be measured. For example, after contacting a butyrylcholinesterase variant of the invention with a camptothecin derivative substrate, camptothecin conversion or hydrolysis activity can be measured by a variety of methods known in the art and described herein, such as high-performance liquid chromatography or a cytotoxicity assay.

[0102] The invention further provides a method of treating cancer by administering to an individual an effective amount of a butyrylcholinesterase variant selected from SEQ ID NOS: 2, 4, 6, 8, 10, 12, 14, 24, 26, 28, 30, 32, 34, 36, 38, 40, 42, 44, 46, 48, 50, 52, 54, 56, 58, 60, 62, 64, 66, 68, 70, 72, 74, 76, 78, 80, 82, 84, 86, 88, 90, 92, 94, 96, 98, 100, 102, 104, 106, 108, 110, 112, 114, 116, 118, 120, 122, 124, 126, 128, 130, 132, 134, 136, 138, 140, 142, 144, 146, 148, 150, 152, 154, 156, 158, 160, 162, 164, 166, 168, 170, 172, 174, 176, 178, 180, 182, 184, 186, 188, 190, 192, 194, and 196, or functional fragment thereof, exhibiting increased capability to convert a camptothecin derivative to a topoisomerase inhibitor compared to butyrylcholinesterase. In one embodiment, the cancer is metastatic colorectal cancer. In another embodiment the cancer is ovarian cancer. In a further embodiment the cancer is lung cancer, for example, small cell lung cancer or non-small cell lung cancer. In a still further embodiment the cancer is non-Hodgkin's lymphoma. In another embodiment, the cancer is a central nervous system cancer.

[0103] The invention also provides a method of treating cancer by administering to an individual an effective amount of a butyrylcholinesterase variant selected from SEQ ID NOS: 2, 4, 6, 8, 10, 12, 14, 24, 26, 28, 30, 32, 34, 36, 38, 40, 42, 44, 46, 48, 50, 52, 54, 56, 58, 60, 62, 64, 66, 68, 70, 72, 74, 76, 78, 80, 82, 84, 86, 88, 90, 92, 94, 96, 98, 100, 102, 104, 106, 108, 110, 112, 114, 116, 118, 120, 122, 124, 126, 128, 130, 132, 134, 136, 138, 140, 142, 144, 146, 148, 150, 152, 154, 156, 158, 160, 162, 164, 166, 168, 170, 172, 174, 176, 178, 180, 182, 184, 186, 188, 190, 192, 194, 196, 202 or 204 or functional fragment thereof, exhibiting increased capability to convert CPT-11 to a topoisomerase inhibitor compared to butyrylcholinesterase. In one embodiment, the topoisomerase inhibitor is SN-38.

[0104] The invention further provides a method of treating cancer by administering to an individual an effective amount of a butyrylcholinesterase variant selected from SEQ ID NOS: 2, 4, 6, 8, 10, 12, 14, 24, 26, 28, 30, 32, 34, 36, 38, 40, 42, 44, 46, 48, 50, 52, 54, 56, 58, 60, 62, 64, 66, 68, 70, 72, 74, 76, 78, 80, 82, 84, 86, 88, 90, 92, 94, 96, 98, 100, 102, 104, 106, 108, 110, 112, 114, 116, 118, 120, 122, 124, 126, 128, 130, 132, 134, 136, 138, 140, 142, 144, 146, 148, 150, 152, 154, 156, 158, 160, 162, 164, 166, 168, 170, 172, 174, 176, 178, 180, 182, 184, 186, 188, 190, 192, 194, 196, 202 or 204, or functional fragment thereof, exhibiting increased capability to convert a paclitaxel prodrug to paclitaxel compared to butyrylcholinesterase. In one embodiment, the cancer is metastatic colorectal cancer. In another embodiment the cancer is ovarian cancer. In another embodiment the cancer is breast cancer. In a further embodiment the cancer is lung cancer. In a still further embodiment the cancer is Kaposi's sarcoma.

[0105] Paclitaxel and camptothecin derivatives are known to be effective chemotherapeutic agents against a variety of cancers. For example, CPT-11 has been approved by the FDA for the treatment of colon cancer. Improvements in the hydrolysis of CPT-11 to SN-38 will aid in the usefulness of this drug and reduce side-effects in patients. For example, side-effects of CPT-11 treatment can include diarrhea, hair loss, nausea, vomiting, myelosuppression, hyperglycemia, alopecia and cholinergic symptoms (Moertel et al., Cancer Chemo. R. 56:95-101 (1972); Muggia et al., Ca. Chemother. Rep. 56:515-521 (1972)). In addition to colon cancer, these drugs have been tested in a variety of other cancers (see Hare et al., Cancer Chemtoher. Pharmacol. 39:187-191 (1997), incorporated herein by reference).

[0106] The invention provides a method of treating cancer in an individual by administering a therapeutically effective amount of the butyrylcholinesterase variant. It is contemplated that a method of treating cancer in an individual by administering a therapeutically effective amount of the butyrylcholinesterase variant can be administration of a variant that further contains an antibody or antibody fragment, for example, the CD20 (SEQ ID NOS: 198 and 200) and EGF (SEQ ID NOS: 18 and 20) antibodies and corresponding fragments described herein. The dosage of a butyrylcholinesterase variant required to be effective depends, for example, on the route and form of administration, the potency and bio-active half-life of the molecule being administered, the weight and condition of the individual, and previous or concurrent therapies. The appropriate amount considered to be an effective dose for a particular application of the method can be determined by those skilled in the art, using the teachings and guidance provided herein. For example, the amount can be extrapolated from in vitro or in vivo butyrylcholinesterase assays described herein. One skilled in the art will recognize that the condition of the individual needs to be monitored throughout the course of treatment and that the amount of the composition that is administered can be adjusted accordingly.

[0107] For treating cancer, a therapeutically effective amount of a butyrylcholinesterase variant of the invention can be, for example, between about 0.1 mg/kg to 0.15 mg/kg body weight, for example, between about 0.15 mg/kg to 0.3 mg/kg, between about 0.3 mg/kg to 0.5 mg/kg or between about 1 mg/kg to 5 mg/kg, depending on the treatment regimen. Similarly, formulations that allow for timed-release of a butyrylcholinesterase variant would provide for the continuous release of a smaller amount of a butyrylcholinesterase variant to an individual treated for cancer. It is understood, that the dosage of a butyrylcholinesterase variant has to be adjusted based on the catalytic activity of the variant, such that a lower dose of a variant exhibiting significantly enhanced camptothecin conversion or hydrolysis activity can be administered compared to the dosage necessary for a variant with lower camptothecin conversion or hydrolysis activity.

[0108] A butyrylcholinesterase variant can be delivered systemically, such as intravenously or intraarterially. A butyrylcholinesterase variant can be provided in the form of isolated and substantially purified polypeptides and polypeptide fragments in pharmaceutically acceptable formulations using formulation methods known to those of ordinary skill in the art. These formulations can be administered by standard routes, including for example, topical, transdermal, intraperitoneal, intracranial, intracerebroventricular, intracerebral, intravaginal, intrauterine, oral, rectal or parenteral (e.g., intravenous, intraspinal, subcutaneous or intramuscular) routes. In addition, a butyrylcholinesterase variant can be incorporated into biodegradable polymers allowing for sustained release of the compound useful for treating individual symptomatic of cancer. Biodegradable polymers and their use are described, for example, in detail in Brem et al., J. Neurosurg. 74:441-446 (1991), which is incorporated herein by reference.

[0109] A butyrylcholinesterase variant can be administered as a solution or suspension together with a pharmaceutically acceptable medium. Such a pharmaceutically acceptable medium can be, for example, water, sodium phosphate buffer, phosphate buffered saline, normal saline or Ringer's solution or other physiologically buffered saline, or other solvent or vehicle such as a glycol, glycerol, an oil such as olive oil or an injectable organic ester. A pharmaceutically acceptable medium can additionally contain physiologically acceptable compounds that act, for example, to stabilize or increase the absorption of the butyrylcholinesterase variant. Such physiologically acceptable compounds include, for example, carbohydrates such as glucose, sucrose or dextrans; antioxidants such as ascorbic acid or glutathione; chelating agents such as EDTA, which disrupts microbial membranes; divalent metal ions such as calcium or magnesium; low molecular weight proteins; lipids or liposomes; or other stabilizers or excipients.

[0110] Formulations suitable for parenteral administration include aqueous and non-aqueous sterile injection solutions such as the pharmaceutically acceptable mediums described above. The solutions can additionally contain, for example, buffers, bacteriostats and solutes which render the formulation isotonic with the blood of the intended recipient. Other formulations include, for example, aqueous and non-aqueous sterile suspensions which can include suspending agents and thickening agents. The formulations can be presented in unit-dose or multi-dose containers, for example, sealed ampules and vials, and can be stored in a lyophilized condition requiring, for example, the addition of the sterile liquid carrier, immediately prior to use. Extemporaneous injection solutions and suspensions can be prepared from sterile powders, granules and tablets of the kind previously described.

[0111] The butyrylcholinesterase variant of the invention can further be utilized in combination therapies with other therapeutic agents. Combination therapies that include a butyrylcholinesterase variant can consist of formulations containing the variant and the additional therapeutic agent individually in a suitable formulation. Alternatively, combination therapies can consist of fusion proteins, where the butyrylcholinesterase variant is linked to a heterologous protein, such as a therapeutic protein or antibody or antibody fragment.

[0112] In vivo modes of administration of antibody therapeutics can include intraperitoneal, intravenous and subcutaneous administration of a fusion polypeptide antibody or a functional fragment thereof. Dosages for antibody therapeutics are known or can be routinely determined by those skilled in the art. For example, such dosages are typically administered so as to achieve a plasma concentration from about 0.01 μg/ml to about 100 μg/ml, about 1-5 μg/ml or about 5 μg/ml. In terms of amount per body weight, these dosages typically correspond to about 0.1-300 mg/kg, about 0.2-200 mg/kg or about 0.5-20 mg/kg. Depending on the need, dosages can be administered once or multiple times over the course of the treatment. Generally, the dosage will vary with the age, condition, sex and extent of the pathology of the subject and should not be so high as to cause adverse side effects. Moreover, dosages can also be modulated by the physician during the course of the treatment to either enhance the treatment or reduce the potential development of side effects. Such procedures are known and routinely performed by those skilled in the art.

[0113] A butyrylcholinesterase variant of the invention also can be delivered to an individual by administering an encoding nucleic acid for the peptide or variant. The encoding nucleic acids for the butyrylcholinesterase variant of the invention are useful in conjunction with a wide variety of gene therapy methods known in the art for delivering a therapeutically effective amount of the polypeptide or variant. Using the teachings and guidance provided herein, encoding nucleic acids for a butyrylcholinesterase variant can be incorporated into a vector or delivery system known in the art and used for delivery and expression of the encoding sequence to achieve a therapeutically effective amount. Applicable vector and delivery systems known in the art include, for example, retroviral vectors, adenovirus vectors, adenoassociated virus, ligand conjugated particles and nucleic acids for targeting, isolated DNA and RNA, liposomes, polylysine, and cell therapy, including hepatic cell therapy, employing the transplantation of cells modified to express a butyrylcholinesterase variant, as well as various other gene delivery methods and modifications known to those skilled in the art, such as those described in Shea et al., Nature Biotechnology 17:551-554 (1999), which is incorporated herein by reference.

[0114] Specific examples of methods for the delivery of a butyrylcholinesterase variant by expressing the encoding nucleic acid sequence are well known in art and described in, for example, U.S. Pat. No. 5,399,346; U.S. Pat. Nos. 5,580,859; 5,589,466; 5,460,959; 5,656,465; 5,643,578; 5,620,896; 5,460,959; 5,506,125; European Patent Application No. EP 0 779 365 A2; PCT No. WO 97/10343; PCT No. WO 97/09441; PCT No. WO 97/10343, all of which are incorporated herein by reference. Other methods known to those skilled in the art also exist and are similarly applicable for the delivery of a butyrylcholinesterase variant by expressing the encoding nucleic acid sequence.

[0115] It is understood that modifications that do not substantially affect the activity of the various embodiments of this invention are also included within the definition of the invention provided herein. Accordingly, the following examples are intended to illustrate but not limit the present invention.

### EXAMPLE I

### Libraries of Butyrylcholinesterase Variants

[0116] This example describes the synthesis and characterization of butyrylcholinesterase variant libraries expressed in mammalian cells.

[0117] Initial libraries of butyrylcholinesterase variants were generated by mutating residues determined to be important for the catalytic activity of butyrylcholinesterase. Residues within butyrylcholinesterase that are potentially important for catalytic activity were determined by docking a substrate into the active site of butyrylcholinesterase with the FlexiDock program (Tripos Inc., St. Louis, Mo.) in Sybyl 6.4 software on a Silicone Graphics Octane computer. Residues important for catalytic activity were mutated using either PCR-based mutagenesis or codon-based mutagenesis as described herein and packaged into libraries.

[0118] Butyrylcholinesterase variant libraries were generated, for example, using PCR-site directed mutagenesis of human butyrylcholinesterase DNA performed utilizing Pfu polymerase (Stratagene, La Jolla, Calif.). Three oligonucleotide primers were used to perform the mutagenesis. The mutagenesis primers were used at the same time as a general primer such as the SP6 promoter sequencing primer (MBI Fermentas, Amherst, N.Y.) to amplify one end of the butyrylcholinesterase cDNA. The PCR reaction products (megaprimers) were cleaned on QuiaQuick PCR (Qiagen, Santa Clarita, Calif.) according to the manufacturer's protocol to remove excess primers. The cleaned megaprimers were extended in a second PCR reaction to generate the complete 1.8 kb coding sequence of each variant.

[0119] The 1.8-kb fragments constituting the butyrylcholinesterase variants were cloned into the plasmid pGS and resequenced to make sure the desired mutation was present. The plasmid pGS is identical with pRc/CMV (Invitrogen, Carlsbad, Calif.) except that the Neo gene has been replaced by rat glutamine synthesase. These variants can be stably expressed, for example, in Chinese Hamster Ovary (CHO) cell lines, or transiently expressed, for example, as described below in 293T cells.

[0120] Butyrylcholinesterase variant libraries were also generated, for example, using codon-based mutagenesis of human butyrylcholinesterase DNA. Regions of butyrylcholinesterase that were predicted to be important for catalytic efficiency based on structural modeling or sequence alignments between different species were targeted for mutagenesis. Seven regions that were predicted to be important for catalytic efficiency are shown in Table 1.

[0121] The seven regions of butyrylcholinesterase selected for focused library synthesis span residues that include the 8 aromatic active site gorge residues (W82, W112, Y128, W231, F329, Y332, W430 and Y440) as well as two of the catalytic triad residues. The integrity of intrachain disulfide bonds, located between ⁶⁵Cys-⁹²Cys, ²⁵²Cys⁻²⁶³Cys, and ⁴⁰⁰Cys⁻⁵¹⁹Cys is maintained to ensure functional butyrylcholinesterase structure. In addition, putative glycosylation sites (N-X-S/T) located at residues 17, 57, 106, 241, 256, 341, 455, 481, 485, and 486 also generally are avoided in the library synthesis. In total, the seven focused libraries span 79 residues, representing approximately 14% of the butyrylcholinesterase linear sequence, and result in the expression of about 1500 distinct butyrylcholinesterase variants.

[0122] Libraries of nucleic acids corresponding to the seven regions of human butyrylcholinesterase to be mutated are synthesized by codon-based mutagenesis, as described above. Briefly, multiple DNA synthesis columns are used for synthesizing the oligonucleotides by β-cyanoethyl phosphoramidite chemistry, as described previously by Glaser et al., supra, 1992. In the first step, trinucleotides encoding for the amino acids of butyrylcholinesterase are synthesized on one column while a second column is used to synthesize the trinucleotide NN(G/T), where N is a mixture of dA, dG, dC, and dT cyanoethyl phosphoramadites. Using the trinucleotide NN(G/T) results in thorough mutagenesis with minimal degeneracy, accomplished through the systematic expression of all twenty amino acids at every position.

[0123] Following the synthesis of the first codon, resins from the two columns are be mixed together, divided, and replaced in four columns. By adding additional synthesis columns for each codon and mixing the column resins pools of degenerate oligonucleotides will be segregated based on the extent of mutagenesis. The resin mixing aspect of codon-based mutagenesis makes the process rapid and cost-effective because it eliminates the need to synthesize multiple oligonucleotides. In the present study, the pool of oligonucleotides encoding single amino acid mutations are used to synthesize focused butyrylcholinesterase libraries. The oligonucleotides encoding the butyrylcholinesterase variants containing a single amino acid mutation can be cloned, for example, into the doublelox targeting vector using oligonucleotide-directed mutagenesis (Kunkel, supra, 1985).

[0124] Several butyrylcholinesterase variants from the libraries described above were found to have enhanced catalytic activity when compared to wild-type butyrylcholinesterase. Variants from the libraries described above were also assayed for enhanced carboxylesterase activity using a variety of assays described herein, such as the o-nitrophenyl acetate hydrolysis assay and HPLC assay for the formation of SN-38. One variant from these libraries, referred to as F227A (SEQ ID NO: 2), showed at least a 3 fold increase in butyrylcholinesterase activity compared to wild-type butyrylcholinesterase in the HPLC assay. F227A contains a single amino acid substitution in the human butyrylcholinesterase polypeptide sequence which replaces a phenylalanine at position 227 with an alanine. At the DNA level this is a change from a TTT codon to a GCG codon.

[0125] Using the F227A variant as a template, additional site-directed mutations were generated resulting in the construction of several double mutants. The regions chosen for site-directed mutation were residues predicted to be important for catalytic efficiency as described herein (see, for example, Table 1). For example, the following double mutants were generated (see Table 2). The nucleotide and amino acid sequence of human butyrylcholinesterase (SEQ ID NOS: 21 and 22) is shown in FIG. 11 for reference.

TABLE 2

| | Amino acid change | Codon change |
|---|---|---|
| | (in addition to F227A change, | (in addition to F227A |
| BChE Variant | phenylalanine to alanine) | change, TTT to GCT) |
| F227A/T284A | threonine to alanine | ACT to GCT |
| F227A/L286Q | leucine to glutamine | TTG to CAG |
| F227A/L286S | leucine to serine | TTG to TCG |
| F227A/L286H | leucine to histidine | TTG to CAT |
| F227A/L286W | leu to tryptophan | TTG to TGG |
| F227A/S287P | serine to proline | TCA to CCT |

[0126] Butyrylcholinesterase variants that contain double mutations were expressed in a transient system using 293T human embryonic kidney cells. Briefly, on day 1, 293T cells were plated at 1.5×10⁵ cells/well in a BioCoat 24-well plate. The cells were then allowed to recover overnight. On the second day, dilute 2 ul of Lipofectamine 2000/well in 50 ul Opti-MEM/well, and incubate 5 minutes. Dilute 500 ng-1 ug DNA/well in 50 ul Opti-MEM/well. The two diluted solutions were mixed, and incubated for 20 minutes at room temperature. Media was removed from cells and replaced with 500 ul/well complete growth media, without penicillin or streptomycin. Subsequently, 100 ul of diluted solutions was added to each well, and incubated on cells for 4 hours. The media/DNA/Lipofectamine 2000 was removed from cells, and replaced with 1 ml of Ultraculture serum free media (Bio Wittaker) per well. The butyrylcholinesterase variant polypeptides were allowed to accumulate for 48-96 hours and the conditioned media from the cells was used directly. For other applications the butyrylcholinesterase variant polypeptides can be purified as described below in Example VI.

[0127] Butyrylcholinesterase variants that contain double mutations were assayed for activity as described below. For example, the variants were assayed for carboxylesterase activity using an o-nitrophenyl acetate hydrolysis assay, CPT-11 conversion activity using an HPLC based assay, and cytotoxicity of a cancer cell line.

### EXAMPLE II

### Carboxylesterase Activity of Butyrylcholinesterase Variants

[0128] This example shows carboxylesterase activity of several butyrylcholinesterase variants.

[0129] A standard assay for carboxylesterase activity is the o-nitrophenyl acetate (o-NPA) hydrolysis assay (see Beaufay et al., J. Cell. Biol. 61:188-200 (1974)). A modification of this assay that measures o-NPA activity of butyrylcholinesterase variants normalized by capturing with an anti-butyrylcholinesterase antibody was performed as described below.

[0130] Protocol to Determine Carboxylesterase activity of Captured Butyrylcholinesterase by o-Nitrophenyl acetate:

1) Coat 96-well Immulon 2 plates with rabbit anti-human butyrylcholinesterase (Dako #A0032) at 10 mg/ml in PBS (100 ml/well) overnight at 4° C.
2) Remove coating solution and block plate with 3% BSA in PBS (250 ml/well) for 2 hours at room temperature.
3) Add 200 ml butyrylcholinesterase variant conditioned media and incubate at RT for 2 hrs.
4) Wash plate 3 times with 250 ml/well PBS.
5) Add 85 ml/well 0.1 M potassium phosphate pH 7.0
6) Add 13.6 mg o-NPA to 100 ml acetonitrile, mix to dissolve. Add 100 ml of this stock to 6.3 mls water and mix well.
7) Wash plate 3 times with PBS.
8) Add 15 ml of diluted o-NPA substrate.
9) Read absorbance at 405 nm.

[0131] Conditioned media from butyrylcholinesterase variants that were transiently expressed in 293T cells was tested using the above described anti-butyrylcholinesterase antibody capture/normalization assay for carboxylesterase activity. As shown in the representative assay in FIG. 1, several butyrylcholinesterase variants showed carboxylesterase activity. The first variant shown in FIG. 1 is F227A (see left-most bar). The level of activity of the other variants can be compared to the level of activity of F227A. The level of activity of wild-type butyrylcholinesterase in this assay was approximately 50% of the level of activity seen with F227A. In order to determine the amount of variability present in the assay, several wells contained the same variant. For example, four wells are labeled as containing the F227A variant in addition to the first well. The level of activity in all five wells is similar and demonstrates a low level of variability within this assay.

[0132] Butyrylcholinesterase residues identified by this method that effect carboxylesterase substrate hydrolysis include the following: F227, A328, Y332, T284, P285, L286. This assay can be used to quickly screen a number of variants for activity. Activity measured in this assay can be predictive of CPT-11 activation and can be used to identify residues or regions of BChE involved in CPT-11 activation.

### EXAMPLE III

### CPT-11 Conversion Activity of Butyrylcholinesterase Variants

[0133] This example shows butyrylcholinesterase variants that have increased CPT-11 conversion activity compared to butyrylcholinesterase.

[0134] Butyrylcholinesterase variants were assayed for CPT-11 conversion activity using fluorescent High Performance Liquid Chromotography (HPLC) detection of SN-38 formation as described in Dodds and Rivory, Mol. Pharmacol. 56:1346-1353 (1999), which is incorporated herein by reference. The conversion of CPT-11 to SN-38 is shown in FIG. 2. Briefly, conditioned media from transiently expressed BChE variants were exposed to 20 mM CPT-11 for 72 hours at 37° C. and analyzed by HPLC for SN-38 formation (peak at about 4 minutes column retention time). FIG. 3 shows the amount of SN-38 produced using conditioned media from cells that were mock-transfected which means that the transfection was performed as usual however no DNA was added. FIG. 4 shows the amount of SN-38 produced using conditioned media from cells that were transfected with F227A, and FIG. 5 shows the amount of SN-38 produced using conditioned media from cells that were transfected with F227A/L286S.

[0135] As shown in FIGS. 3-5, the F227A variant produced a small amount of SN-38 and variant F227A/L286S showed significant conversion Of CPT-11 to SN-38 as compared to mock and F227A variant conditioned medias. In this assay, wild-type butyrylcholinesterase did not show detectable levels of SN-38.

[0136] Butyrylcholinesterase variants identified by this method that had increased CPT-11 conversion to SN-38 compared to wild-type butyrylcholinesterase include: F227A (SEQ ID NO: 2), F227A/T284A (SEQ ID NO: 4), F227A/L286Q (SEQ ID NO: 6), F227A/L286S (SEQ ID NO: 8), F227A/L286H (SEQ ID NO: 10), F227A/L286W (SEQ ID NO: 12), and F227A/S287P (SEQ ID NO: 14). Table 3 shows the approximate fold improvement in CPT-11 conversion to SN-38 in these variants. The actual fold improvement can be significantly higher than listed in Table 3 because the values in Table 3 are based on the fold improvement compared to wild-type butyrylcholinesterase. Since the activity of wild-type butyrylcholinesterase is extremely low in this assay (less than 1% conversion), the value for wild-type butyrylcholinesterase is prone to more variability than other activity values. Therefore, the activity values listed in Table 3 are very conservative values for the activity of these variants and so the variants in Table 3 have at least the listed activity value and more. For example, the butyrylcholinesterase variant F227A/L268S (SEQ ID NO: 8) has at least a 50-fold increase in camptothecin conversion activity compared to butyrylcholinesterase. Said another way, the butyrylcholinesterase variant F227A/L268S (SEQ ID NO: 8) exhibits a 50-fold or greater increase in conversion capability compared to the butyrylcholinesterase.

TABLE 3

| | | Fold improvement in CPT-11 |
|---|---|---|
| SEQ ID NO: | BChE Variant | conversion |
| 2 | F227A | >3 |
| 4 | F227A/T284A | >7 |
| 6 | F227A/L286Q | >10 |
| 8 | F227A/L286S | >50 |
| 10 | F227A/L286H | >35 |
| 12 | F227A/L286W | >42 |
| 14 | F227A/S287P | >6 |

### EXAMPLE IV

### Butyrylcholinesterase-Mediated Cytotoxicity and Enchanced CPT-11 Activated Killing by Butyrylcholinesterase Variants

[0137] This example shows butyrylcholinesterase variants that have increased cytotoxicity in a cancer cell line compared to butyrylcholinesterase.

[0138] A cellular cytotoxicity assay was used to demonstrate the level of CPT-11 activation by BChE variants. Clinically relevant concentrations of CPT-11 (0.5-10 mM) were exposed to BChE variants for 24-72 hours at 37° C. Briefly, CPT-11 at 4 mM was incubated for 72 hours with expressed wild-type BChE, the 6-6 variant, or F227A/L286Q variant. SW48 colon carcinoma cells were exposed to the activated CPT-11 at a concentration of 0.5 mM for 72 hours and cell viability measured by the MTT method. The MTT (3-(4,5-dimethylthiazolyl-2)-2,5-diphenyltetrazolium bromide) assay is commercially available and can be used to measure cell viability based on the ability of a cell to reduce a redox sensitive dye. Note the 6-6 variant is a quadruple mutant referenced as A328W/Y332M/S287G/F227A (SEQ ID NO: 16) in the nomenclature used throughout to describe variants. The 6-6 variant contains the following codons at variant positions: GCG encodes alanine at amino acid position 227, GGT encodes glycine at amino acid position 287, ATG encodes methionine at amino acid position 332, and TGG encodes tryptophane at amino acid position 328.

[0139] As shown in FIG. 6, CPT-11 mediated cytotoxicity in SW48 colon carcinoma cells is significantly enhanced in the presence of BChE and BChE variants. Both the 6-6 variant (SEQ ID NO: 16) and F227/L286Q (SEQ ID NO: 6) variant showed increased tumor cell cytotoxicity mediated by CPT-11 activation.

### EXAMPLE V

### Antibody-Butyrylcholinesterase Fusion Polypeptide for the Targeted Activation of CPT-11

[0140] This example shows the construction and characterization of an anti-EGF receptor-BChE fusion polypeptide which can be used for Antibody Directed Enzyme Pro-drug Therapy (ADEPT) with CPT-11.

[0141] A model antibody-BChE fusion polypeptide was constructed by fusing the N-terminus of the BChE (truncated L530 monomer) to the C-terminus of the CH1 domain of the anti-epidermal growth factor receptor (EGFR) antibody ch225. The two domains are linked by either a GGGS linker or the natural antibody hinge region. A model antibody-enzyme fusion polypeptide was produced which exhibits both antigen binding and catalytic enzyme functions. The nucleotide and amino acid sequence of the mouse anti-EGF variable light chain is shown in FIG. 9 and the nucleotide and amino acid sequence of the mouse anti-EGF variable heavy chain and constant heavy chain I hinge region of L530 is shown in FIG. 10.

[0142] The truncated L530 monomer is described in Blong et al., Biochem. J. 327:747-757 (1997) and is incorporated herein by reference. This monomer contains a BChE which is truncated at the C terminus such that it does not assemble into a tetramer as seen with wild-type BChE. The L530 monomer does retain most or all butyrylcholinesterase (BChE) activity.

[0143] An ELISA assay showing binding of expressed anti-EGFR-BChE L530 to anti-kappa capture antibody and measuring activity of bound butyrylcholinesterase by butyrylthiocholine hydrolysis is shown in FIG. 7. This demonstrates that intact fusion polypeptide (bound through the antibody light chain) exhibits butyrylcholinesterase activity.

[0144] The protocol for anti-Kappa capture of anti-EGFR-L530 is as follows:

1) Coat 96-well Immulon 2 plates with 200 ml of 10 mg/ml anti-human Kappa antibody in PBS overnight.
2) Block plate with 3% BSA in PBS (250 ml/well) for 2 hours at room temperature.
3) Wash plate 3× with 250 ml/well PBS.
4) Add 200 ml BChE conditioned media and incubate at RT for 2 hours.
5) Prepare working solution of DTNB by making a 1:10 dilution of stock 5 mM DTNB in 0.1 M Potassium phosphate pH 7.0. Add 180 ml per well
6) Prepare working solution of Butyrythiocholine (BTC) by making 1:20 dilution of 200 mM stock in water. Add 20 ml per well.
7) Incubate plate at 37° C. and read on a spectrophotometer at A405 nm.

[0145] An ELISA assay measuring butyrylcholinesterase activity of the anti-EGFR-BChE L530 specifically bound to a cell membrane preparation containing the EGFR antigen is shown in FIG. 8. These results demonstrates antigen-specific binding of the fusion protein through the antibody domain and enzymatic activity of the butyrylcholinesterase domain.

[0146] The protocol for anti-EGFR binding to A431 membrane preparations is as follows:

1) Coat 96-well Immulon 2 plates with 50 ml/well of A431 cell lysate diluted 1/20 in 10 mM HEPES pH 7.4, 0.1% Triton X-100 and dry in the hood overnight.
2) Block plate with 3% BSA in PBS (250 ml/well) for 2 hours at room temperature.
3) Wash plate 3× with 250 ml/well PBS.
4) Add 200 ml BChE conditioned media and incubate at RT for 2 hours.
5) Prepare working solution of DTNB by making a 1:10 dilution of stock 5 mM DTNB in 0.1 M Potassium phosphate pH7.0. Add 180 ml per well
6) Prepare working solution of Butyrythiocholine (BTC) by making 1:20 dilution of 200 mM stock in water. Add 20 ml per well.
7) Incubate plate at 37° C. and read on a spectrophotometer at A405 nm.

### EXAMPLE VI

### Purification and Characterization of the Butyrylcholinesterase Variants

[0147] This example shows how butyrylcholinesterase variant polypeptides an be purified. These purified polypeptides can be used, for example, in the assays and pharmaceutical compositions described herein.

[0148] To purify the butyrylcholinesterase variants, the culture medium corresponding to each variant is filtered through Whatman #1 filter paper (Whatman Inc., Clifton, N.J.) on a Buchner funnel. The filtrate is poured through a chromatography column (XK50/30, Pharmacia Biotech, Piscatawy, N.J.) packed with 100 ml of affinity gel procainamide-Sepharose 4B. The butyrylcholinesterase variants stick to the affinity gel during loading so that 20 mg of enzyme that was previously in 20 liters is concentrated in 100 ml of affinity gel. The affinity gel is subsequently washed with 0.3M sodium chloride in 20 mM potassium phosphate pH 7.0 and 1 mM EDTA to elute contaminating proteins. Next, the affinity gel is washed with buffer containing 20 mM potassium phosphate and 1 mM EDTA pH 7.0 to reduce the ionic strength. Finally, the butyrylcholinesterase variants is eluted with 250 ml of 0.2M procainamide in buffer.

[0149] To further purify the butyrylcholinesterase variants and remove the procainamide a second purification step can be performed. The butyrylcholinesterase variants recovered in the first purification step are diluted 10-fold with buffer (20 mM Tris Cl, 1 mM EDTA pH 7.4) to reduce the ionic strength to about 0.02M. The diluted enzyme is loaded onto a column containing 400 ml of the weak anion exchanger DE52 (Whatman, Clifton, N.J.). At this low ionic strength the butyrylcholinesterase variant sticks to the ion exchange gel. After loading is complete the column is washed with 2 liters of buffer containing 20 mM Tris Cl and 1 mM EDTA pH7.4 until the absorbency of the eluant at 280 nm is nearly zero, indicating that the procainamide has washed off. Subsequently, the butyrylcholinesterase variants are eluted from the column with a salt gradient from 0 to 0.2M NaCl in 20 mM Tris Cl pH 7.4. Following the elution of the butyrylcholinesterase variants 10 ml fractions are collected for each variant using a fraction collector. Activity assays are performed to identify the peak containing butyrylcholinesterase variant. SDS gel electrophoresis can be performed to determine the purity of each butyrylcholinesterase variants, which is typically determined to be approximately 90%.

### EXAMPLE VII

### Production of Antibody-BChE Fusion Proteins and Evaluation of Targeted Prodrug Activation and Cytotoxicity In Vitro

[0150] This example demonstrates optimization BChE variants in an antibody directed enzyme prodrug therapy model. Antibody-enzyme fusion proteins incorporating optimized variant residues were identified by library screening and the feasibility of using optimized BChE in ADEPT with CPT-11 was confirmed by targeting CD20, a non-internalizing cell surface antigen present on B-lymphocytes.

[0151] CD20 is a useful target antigen to test the feasibility of using optimized BChE in ADEPT as the antigen is abundantly expressed on human B lymphoma lines (3.2×10⁵ molecules/cell) and does not undergo significant internalization upon antibody binding. AME133 is a humanized anti-CD20 with fully human germline framework regions shown in FIGS. 19 and 20 and set forth as SEQ ID NOS: 198 and 200, with corresponding nucleic acid sequences SEQ ID NOS: 197 and 199. This antibody was generated at Applied Molecular Evolution using the company's directed evolution strategies, and the monovalent Fab binds to CD20 with extremely high affinity (1×10⁻⁹ M). An exemplary model fusion protein (anti-CD20-BChE.4-1) was generated and is shown in FIG. 19. Anti-CD20-BChE.4-1 (SEQ ID NO: 202) is composed of AME133 Fab fused at the C-terminal end of the CH1 heavy chain domain to the N-terminus of modified BChE variant L530 (SEQ ID NO: 204), which is a functional fragment of reference SEQ ID NO: 180. The BChE variant was truncated at amino acid 530 to abrogate its normal assembly into tetramers. The monomeric version of the enzyme exhibits the equivalent activity of each subunit of the naturally occurring tetrameric form, with no loss of activity due to allosteric effects as described by Blong et al., Biochem J 327 (Pt 3): 747-57 (1997).

[0152] Non-adherent HEK 293 cells were adapted to suspension culture in serum-free low protein media (UltraCULTURE, BioWhittaker) and transiently transfected with fusion protein, producing yields of 2-4 mg/L. A two-step purification procedure was developed using anion exchange on Sepharose Q followed by a hydrophobic interaction chromatography step on phenyl Sepharose. This resulted in product of >90% purity with one major contaminant band detected by SDS-PAGE. The fusion protein maintains a Km value for CPT-11 identical to that of the BChE.4-1 variant alone. Control fusion protein constructs have also been generated and expressed. These are AME133 Fab fused at the C-terminal end of the CH1 heavy chain domain to the N-terminus of truncated wild type BChE (anti-CD20-BChE.wt) and anti-epidermal growth factor receptor (EGFR) Fab fused to BChE.4-1.

[0153] As shown in FIG. 14, anti-CD20-BChE fusion proteins exhibit antigen specific binding to CD20 positive SKW tumor cells as compared to the control anti-EGFR-BChE construct. Bound fusion protein was detected by BChE specific hydrolysis of butyrylthiocholine iodide.

[0154] In order to demonstrate the utility of the fusion protein in ADEPT, it was shown that the anti-CD20-BChE fusion protein binds tightly to tumor cells in vitro and generates cytotoxic SN38 in the presence of CPT-11. Antigen-positive SKW 6.4 human B lymphoma cells were incubated with anti-CD20-BChE.4-1 and unbound fusion protein was removed by washing. Cells were then incubated with increasing concentrations of CPT-11 for four hours and washed again. Cell viability was assessed 72 hours later. Following incubation with anti-CD20-BChE.4-1, a 7 to 10-fold decrease in the EC₅₀ of CPT-11 was observed, relative to cells treated with mock conditioned media (FIG. 15). Briefly, live tumor cells were pre-incubated with anti-CD20-BChE.4-1 or mock conditioned media and washed prior to 4-hour exposure to CPT-11 over a range of concentrations. Bound fusion protein resulted in a marked decrease in the EC50 for CPT-11 killing. Cell viability was evaluated in a 72 hour MTT assay. Similar experiments using control anti-EGFR-BChE.4-1 or anti-CD20-BChE.wt showed no increase in cytotoxicity over CPT-11 alone. In these experiments approximately 0.8 units of fusion protein BTC activity were localized per 1×10⁶ (1.2 mg) SKW cells.

[0155] In patients treated with 200 mg/m2 CPT-11, plasma concentrations of CPT-11 remained above 0.1 μM for at least 24 hours (Ducreux et al., Ann Oncol 14 Suppl 2: ii17-23 (2003)). CPT-11 is dosed as a single agent at up to 500 mg/m² and plasma peak concentration is dose-proportional (Mathijssen et al. Clin Cancer Res 7: 2182-94 (2001); Ducreux et al., supra, 2003). These findings demonstrate the targeted killing of tumor cells with anti-CD20-BChE.4-1 in vitro at concentrations of CPT-11 that are pharmacologically relevant and sustainable over time in patients.

### EXAMPLE VIII

### Optimization of Butyrylcholinesterase for the Improved Activation of CPT-11

[0156] This example demonstrates identification of additive variants incorporating beneficial mutations from different library regions that resulted, inter alia, in the isolation of the H77F, F227A, P285N, V331A variant (SEQ ID NO: 180), also referred to as the 4-1 variant, exhibiting a >3000-fold increase in CPT-11 hydrolysis over wild-type BChE (FIG. 12) and a 5-6-fold improvement in the Km for CPT-11, from 40 μM to ˜7 μM

[0157] A series of focused BChE variant libraries corresponding to amino acids predicted to be lining the active site gorge (Harel et al., supra, 1992) of the enzyme was synthesized. Using pools of oligonucleotides encoding single amino acid mutations for 7 different library regions of 6-15 residues, libraries were synthesized using uracil-containing single-stranded DNA as a template for oligonucleotide-directed mutagenesis (Glaser et al., supra, 1992). Transformed libraries were plated on agar, and bacterial clones were picked and grown in a 96-well format for DNA plasmid preps.

[0158] BChE plasmid variants were expressed transiently in the human embryonic kidney cell line 293T and assayed for activity at 72 hours post-transfection. Primary screening of variants was performed by indirect measurement of enzymatic activation of CPT-11 (FIG. 2) in SW48 colon carcinoma cell cytotoxicity assays. Enzyme expression in this system varies less than 20% between wells. To avoid identification of expression variants, only hits exhibiting >2-fold increased cytotoxicity were picked. Functional hits identified in these assays were characterized by sequence analysis of the corresponding DNA from the original preps. Primary screening resulted in the identification of 65 beneficial amino acid changes at 25 different positions in the enzyme. Direct measurement of BChE-mediated CPT-11 hydrolysis was quantitated by fluorescence detection of SN38 separated by reverse-phase HPLC (Dodds and Rivory, Mol Pharmacol 56: 1346-53 (1999). This method was used to compare SN38 formation by expressed variants to that of the wild-type enzyme and to calculate the Km of variants for CPT-11. Identification of additive variants incorporating beneficial mutations from different library regions resulted in the isolation of a variant exhibiting a >3000-fold increase in CPT-11 hydrolysis over wild-type BChE (FIG. 12) and a 5-6-fold improvement in the Km for CPT-11, from 40 μM to ˜7 μM (FIG. 13). FIG. 13 shows a Hofstee plot of CPT-11 hydrolysis by BChE variant 4-1. Enzyme was incubated at 37° C. for 24 hours with CPT-11 over a range of concentrations from 1-80 μM. The variant exhibits a Km of 6.9 μM, a >5-fold improvement over the 40 μM Km characteristic of native serum BChE. Velocity (v) is in light absorbance units at 540 nm. Substrate concentration [s] is μM CPT-11.

[0159] For the quantitation of SN38 formation by BChE variant 4-1, wild type (20 μg) or BChE.4-1 (0.05 μg) enzymes were incubated with CPT-11 at 37° C. for 24 hours. Samples were acidified and resolved by reverse-phase HPLC on a NovaPak C18 column to separate SN38 from unactivated CPT-11. SN38 peak area under the curve (AUC) was used to compare CPT-11 activation by the wild-type enzyme to the optimized BChE.4-1 variant.

[0160] Throughout this application various publications have been referenced within parentheses. The disclosures of each of these publications in their entireties are hereby incorporated by reference in this application in order to more fully describe the state of the art to which this invention pertains.

[0161] Although the invention has been described with reference to the disclosed embodiments, those skilled in the art will readily appreciate that the specific experiments detailed are only illustrative of the invention. It should be understood that various modifications can be made without departing from the spirit of the invention. Accordingly, the invention is limited only by the following claims.

The application's sequence listing, which the Patent Office published only in electronic form, follows.

SEQUENCE LISTING (201 sequences)

SEQ ID NO: 1 - DNA, 1722 bp, Artificial
  Synthetic butyrylcholinesterase variant
gaagatgacatcataattgcaacaaagaatggaaaagtcagagggatgaacttgacagtttttggtggcacggtaacagcctttcttggaattccctatgcacagccacctcttggtagacttcgattcaaaaagccacagtctctgaccaagtggtctgatatttggaatgccacaaaatatgcaaattcttgctgtcagaacatagatcaaagttttccaggcttccatggatcagagatgtggaacccaaacactgacctcagtgaagactgtttatatctaaatgtatggattccagcacctaaaccaaaaaatgccactgtattgatatggatttatggtggtggttttcaaactggaacatcatctttacatgtttatgatggcaagtttctggctcgggttgaaagagttattgtagtgtcaatgaactatagggtgggtgccctaggattcttagctttgccaggaaatcctgaggctccagggaacatgggtttatttgatcaacagttggctcttcagtgggttcaaaaaaatatagcagcctttggtggaaatcctaaaagtgtaactctctttggagaaagtgcaggagcagcttcagttagcctgcatttgctttctcctggaagccattcattgttcaccagagccattctgcaaagtggttccgckaatgctccttgggcggtaacatctctttatgaagctaggaacagaacgttgaacttagctaaattgactggttgctctagagagaatgagactgaaataatcaagtgtcttagaaataaagatccccaagaaattcttctgaatgaagcatttgttgtcccctatgggactcctttgtcagtaaactttggtccgaccgtggatggtgattttctcactgacatgccagacatattacttgaacttggacaatttaaaaaaacccagattttggtgggtgttaataaagatgaagggacagcttttttagtctatggtgctcctggcttcagcaaagataacaatagtatcataactagaaaagaatttcaggaaggtttaaaaatattttttccaggagtgagtgagtttggaaaggaatccatcctttttcattacacagactgggtagatgatcagagacctgaaaactaccgtgaggccttgggtgatgttgttggggattataatttcatatgccctgccttggagttcaccaagaagttctcagaatggggaaataatgcctttttctactattttgaacaccgatcctccaaacttccgtggccagaatggatgggagtgatgcatggctatgaaattgaatttgtctttggtttacctctggaaagaagagataattacacaaaagccgaggaaattttgagtagatccatagtgaaacggtgggcaaattttgcaaaatatgggaatccaaatgagactcagaacaatagcacaagctggcctgtcttcaaaagcactgaacaaaaatatctaaccttgaatacagagtcaacaagaataatgacgaaactacgtgctcaacaatgtcgattctggacatcattttttccaaaagtcttggaaatgacaggaaatattgatgaagcagaatgggagtggaaagcaggattccatcgctggaacaattacatgatggactggaaaaatcaatttaacgattacactagcaagaaagaaagttgtgtgggtctc

SEQ ID NO: 2 - protein, 574 aa, Artificial
  Synthetic butyrylcholinesterase variant
  VARIANT (227)..(227): Xaa = Ala
EDDIIIATKNGKVRGMNLTVFGGTVTAFLGIPYAQPPLGRLRFKKPQSLTKWSDIWNATKYANSCCQNIDQSFPGFHGSEMWNPNTDLSEDCLYLNVWIPAPKPKNATVLIWIYGGGFQTGTSSLHVYDGKFLARVERVIVVSMNYRVGALGFLALPGNPEAPGNMGLFDQQLALQWVQKNIAAFGGNPKSVTLFGESAGAASVSLHLLSPGSHSLFTRAILQSGSXNAPWAVTSLYEARNRTLNLAKLTGCSRENETEIIKCLRNKDPQEILLNEAFVVPYGTPLSVNFGPTVDGDFLTDMPDILLELGQFKKTQILVGVNKDEGTAFLVYGAPGFSKDNNSIITRKEFQEGLKIFFPGVSEFGKESILFHYTDWVDDQRPENYREALGDVVGDYNFICPALEFTKKFSEWGNNAFFYYFEHRSSKLPWPEWMGVMHGYEIEFVFGLPLERRDNYTKAEEILSRSIVKRWANFAKYGNPNETQNNSTSWPVFKSTEQKYLTLNTESTRIMTKLRAQQCRFWTSFFPKVLEMTGNIDEAEWEWKAGFHRWNNYMMDWKNQFNDYTSKKESCVGL

SEQ ID NO: 3 - DNA, 1722 bp, Artificial
  Synthetic butyrylcholinesterase variant
gaagatgacatcataattgcaacaaagaatggaaaagtcagagggatgaacttgacagtttttggtggcacggtaacagcctttcttggaattccctatgcacagccacctcttggtagacttcgattcaaaaagccacagtctctgaccaagtggtctgatatttggaatgccacaaaatatgcaaattcttgctgtcagaacatagatcaaagttttccaggcttccatggatcagagatgtggaacccaaacactgacctcagtgaagactgtttatatctaaatgtatggattccagcacctaaaccaaaaaatgccactgtattgatatggatttatggtggtggttttcaaactggaacatcatctttacatgtttatgatggcaagtttctggctcgggttgaaagagttattgtagtgtcaatgaactatagggtgggtgccctaggattcttagctttgccaggaaatcctgaggctccagggaacatgggtttatttgatcaacagttggctcttcagtgggttcaaaaaaatatagcagcctttggtggaaatcctaaaagtgtaactctctttggagaaagtgcaggagcagcttcagttagcctgcatttgctttctcctggaagccattcattgttcaccagagccattctgcaaagtggttccgckaatgctccttgggcggtaacatctctttatgaagctaggaacagaacgttgaacttagctaaattgactggttgctctagagagaatgagactgaaataatcaagtgtcttagaaataaagatccccaagaaattcttctgaatgaagcatttgttgtcccctatggggckcctttgtcagtaaactttggtccgaccgtggatggtgattttctcactgacatgccagacatattacttgaacttggacaatttaaaaaaacccagattttggtgggtgttaataaagatgaagggacagcttttttagtctatggtgctcctggcttcagcaaagataacaatagtatcataactagaaaagaatttcaggaaggtttaaaaatattttttccaggagtgagtgagtttggaaaggaatccatcctttttcattacacagactgggtagatgatcagagacctgaaaactaccgtgaggccttgggtgatgttgttggggattataatttcatatgccctgccttggagttcaccaagaagttctcagaatggggaaataatgcctttttctactattttgaacaccgatcctccaaacttccgtggccagaatggatgggagtgatgcatggctatgaaattgaatttgtctttggtttacctctggaaagaagagataattacacaaaagccgaggaaattttgagtagatccatagtgaaacggtgggcaaattttgcaaaatatgggaatccaaatgagactcagaacaatagcacaagctggcctgtcttcaaaagcactgaacaaaaatatctaaccttgaatacagagtcaacaagaataatgacgaaactacgtgctcaacaatgtcgattctggacatcattttttccaaaagtcttggaaatgacaggaaatattgatgaagcagaatgggagtggaaagcaggattccatcgctggaacaattacatgatggactggaaaaatcaatttaacgattacactagcaagaaagaaagttgtgtgggtctc

SEQ ID NO: 4 - protein, 574 aa, Artificial
  Synthetic butyrylcholinesterase variant
  VARIANT (227)..(227): Xaa = Ala
  VARIANT (284)..(284): Xaa = Ala
EDDIIIATKNGKVRGMNLTVFGGTVTAFLGIPYAQPPLGRLRFKKPQSLTKWSDIWNATKYANSCCQNIDQSFPGFHGSEMWNPNTDLSEDCLYLNVWIPAPKPKNATVLIWIYGGGFQTGTSSLHVYDGKFLARVERVIVVSMNYRVGALGFLALPGNPEAPGNMGLFDQQLALQWVQKNIAAFGGNPKSVTLFGESAGAASVSLHLLSPGSHSLFTRAILQSGSXNAPWAVTSLYEARNRTLNLAKLTGCSRENETEIIKCLRNKDPQEILLNEAFVVPYGXPLSVNFGPTVDGDFLTDMPDILLELGQFKKTQILVGVNKDEGTAFLVYGAPGFSKDNNSIITRKEFQEGLKIFFPGVSEFGKESILFHYTDWVDDQRPENYREALGDVVGDYNFICPALEFTKKFSEWGNNAFFYYFEHRSSKLPWPEWMGVMHGYEIEFVFGLPLERRDNYTKAEEILSRSIVKRWANFAKYGNPNETQNNSTSWPVFKSTEQKYLTLNTESTRIMTKLRAQQCRFWTSFFPKVLEMTGNIDEAEWEWKAGFHRWNNYMMDWKNQFNDYTSKKESCVGL

SEQ ID NO: 5 - DNA, 1722 bp, Artificial
  Synthetic butyrylcholinesterase variant
gaagatgacatcataattgcaacaaagaatggaaaagtcagagggatgaacttgacagtttttggtggcacggtaacagcctttcttggaattccctatgcacagccacctcttggtagacttcgattcaaaaagccacagtctctgaccaagtggtctgatatttggaatgccacaaaatatgcaaattcttgctgtcagaacatagatcaaagttttccaggcttccatggatcagagatgtggaacccaaacactgacctcagtgaagactgtttatatctaaatgtatggattccagcacctaaaccaaaaaatgccactgtattgatatggatttatggtggtggttttcaaactggaacatcatctttacatgtttatgatggcaagtttctggctcgggttgaaagagttattgtagtgtcaatgaactatagggtgggtgccctaggattcttagctttgccaggaaatcctgaggctccagggaacatgggtttatttgatcaacagttggctcttcagtgggttcaaaaaaatatagcagcctttggtggaaatcctaaaagtgtaactctctttggagaaagtgcaggagcagcttcagttagcctgcatttgctttctcctggaagccattcattgttcaccagagccattctgcaaagtggttccgckaatgctccttgggcggtaacatctctttatgaagctaggaacagaacgttgaacttagctaaattgactggttgctctagagagaatgagactgaaataatcaagtgtcttagaaataaagatccccaagaaattcttctgaatgaagcatttgttgtcccctatgggactcctcagtcagtaaactttggtccgaccgtggatggtgattttctcactgacatgccagacatattacttgaacttggacaatttaaaaaaacccagattttggtgggtgttaataaagatgaagggacagcttttttagtctatggtgctcctggcttcagcaaagataacaatagtatcataactagaaaagaatttcaggaaggtttaaaaatattttttccaggagtgagtgagtttggaaaggaatccatcctttttcattacacagactgggtagatgatcagagacctgaaaactaccgtgaggccttgggtgatgttgttggggattataatttcatatgccctgccttggagttcaccaagaagttctcagaatggggaaataatgcctttttctactattttgaacaccgatcctccaaacttccgtggccagaatggatgggagtgatgcatggctatgaaattgaatttgtctttggtttacctctggaaagaagagataattacacaaaagccgaggaaattttgagtagatccatagtgaaacggtgggcaaattttgcaaaatatgggaatccaaatgagactcagaacaatagcacaagctggcctgtcttcaaaagcactgaacaaaaatatctaaccttgaatacagagtcaacaagaataatgacgaaactacgtgctcaacaatgtcgattctggacatcattttttccaaaagtcttggaaatgacaggaaatattgatgaagcagaatgggagtggaaagcaggattccatcgctggaacaattacatgatggactggaaaaatcaatttaacgattacactagcaagaaagaaagttgtgtgggtctc

SEQ ID NO: 6 - protein, 574 aa, Artificial
  Synthetic butyrylcholinesterase variant
  VARIANT (227)..(227): Xaa = Ala
  VARIANT (286)..(286): L286Q
EDDIIIATKNGKVRGMNLTVFGGTVTAFLGIPYAQPPLGRLRFKKPQSLTKWSDIWNATKYANSCCQNIDQSFPGFHGSEMWNPNTDLSEDCLYLNVWIPAPKPKNATVLIWIYGGGFQTGTSSLHVYDGKFLARVERVIVVSMNYRVGALGFLALPGNPEAPGNMGLFDQQLALQWVQKNIAAFGGNPKSVTLFGESAGAASVSLHLLSPGSHSLFTRAILQSGSXNAPWAVTSLYEARNRTLNLAKLTGCSRENETEIIKCLRNKDPQEILLNEAFVVPYGTPQSVNFGPTVDGDFLTDMPDILLELGQFKKTQILVGVNKDEGTAFLVYGAPGFSKDNNSIITRKEFQEGLKIFFPGVSEFGKESILFHYTDWVDDQRPENYREALGDVVGDYNFICPALEFTKKFSEWGNNAFFYYFEHRSSKLPWPEWMGVMHGYEIEFVFGLPLERRDNYTKAEEILSRSIVKRWANFAKYGNPNETQNNSTSWPVFKSTEQKYLTLNTESTRIMTKLRAQQCRFWTSFFPKVLEMTGNIDEAEWEWKAGFHRWNNYMMDWKNQFNDYTSKKESCVGL

SEQ ID NO: 7 - DNA, 1722 bp, Artificial
  Synthetic butyrylcholinesterase variant
gaagatgacatcataattgcaacaaagaatggaaaagtcagagggatgaacttgacagtttttggtggcacggtaacagcctttcttggaattccctatgcacagccacctcttggtagacttcgattcaaaaagccacagtctctgaccaagtggtctgatatttggaatgccacaaaatatgcaaattcttgctgtcagaacatagatcaaagttttccaggcttccatggatcagagatgtggaacccaaacactgacctcagtgaagactgtttatatctaaatgtatggattccagcacctaaaccaaaaaatgccactgtattgatatggatttatggtggtggttttcaaactggaacatcatctttacatgtttatgatggcaagtttctggctcgggttgaaagagttattgtagtgtcaatgaactatagggtgggtgccctaggattcttagctttgccaggaaatcctgaggctccagggaacatgggtttatttgatcaacagttggctcttcagtgggttcaaaaaaatatagcagcctttggtggaaatcctaaaagtgtaactctctttggagaaagtgcaggagcagcttcagttagcctgcatttgctttctcctggaagccattcattgttcaccagagccattctgcaaagtggttccgckaatgctccttgggcggtaacatctctttatgaagctaggaacagaacgttgaacttagctaaattgactggttgctctagagagaatgagactgaaataatcaagtgtcttagaaataaagatccccaagaaattcttctgaatgaagcatttgttgtcccctatgggactccttcgtcagtaaactttggtccgaccgtggatggtgattttctcactgacatgccagacatattacttgaacttggacaatttaaaaaaacccagattttggtgggtgttaataaagatgaagggacagcttttttagtctatggtgctcctggcttcagcaaagataacaatagtatcataactagaaaagaatttcaggaaggtttaaaaatattttttccaggagtgagtgagtttggaaaggaatccatcctttttcattacacagactgggtagatgatcagagacctgaaaactaccgtgaggccttgggtgatgttgttggggattataatttcatatgccctgccttggagttcaccaagaagttctcagaatggggaaataatgcctttttctactattttgaacaccgatcctccaaacttccgtggccagaatggatgggagtgatgcatggctatgaaattgaatttgtctttggtttacctctggaaagaagagataattacacaaaagccgaggaaattttgagtagatccatagtgaaacggtgggcaaattttgcaaaatatgggaatccaaatgagactcagaacaatagcacaagctggcctgtcttcaaaagcactgaacaaaaatatctaaccttgaatacagagtcaacaagaataatgacgaaactacgtgctcaacaatgtcgattctggacatcattttttccaaaagtcttggaaatgacaggaaatattgatgaagcagaatgggagtggaaagcaggattccatcgctggaacaattacatgatggactggaaaaatcaatttaacgattacactagcaagaaagaaagttgtgtgggtctc

SEQ ID NO: 8 - protein, 574 aa, Artificial
  Synthetic butyrylcholinesterase variant
  VARIANT (227)..(227): Xaa = Ala
  VARIANT (286)..(286): L286S
EDDIIIATKNGKVRGMNLTVFGGTVTAFLGIPYAQPPLGRLRFKKPQSLTKWSDIWNATKYANSCCQNIDQSFPGFHGSEMWNPNTDLSEDCLYLNVWIPAPKPKNATVLIWIYGGGFQTGTSSLHVYDGKFLARVERVIVVSMNYRVGALGFLALPGNPEAPGNMGLFDQQLALQWVQKNIAAFGGNPKSVTLFGESAGAASVSLHLLSPGSHSLFTRAILQSGSXNAPWAVTSLYEARNRTLNLAKLTGCSRENETEIIKCLRNKDPQEILLNEAFVVPYGTPSSVNFGPTVDGDFLTDMPDILLELGQFKKTQILVGVNKDEGTAFLVYGAPGFSKDNNSIITRKEFQEGLKIFFPGVSEFGKESILFHYTDWVDDQRPENYREALGDVVGDYNFICPALEFTKKFSEWGNNAFFYYFEHRSSKLPWPEWMGVMHGYEIEFVFGLPLERRDNYTKAEEILSRSIVKRWANFAKYGNPNETQNNSTSWPVFKSTEQKYLTLNTESTRIMTKLRAQQCRFWTSFFPKVLEMTGNIDEAEWEWKAGFHRWNNYMMDWKNQFNDYTSKKESCVGL

SEQ ID NO: 9 - DNA, 1722 bp, Artificial
  Synthetic butyrylcholinesterase variant
gaagatgacatcataattgcaacaaagaatggaaaagtcagagggatgaacttgacagtttttggtggcacggtaacagcctttcttggaattccctatgcacagccacctcttggtagacttcgattcaaaaagccacagtctctgaccaagtggtctgatatttggaatgccacaaaatatgcaaattcttgctgtcagaacatagatcaaagttttccaggcttccatggatcagagatgtggaacccaaacactgacctcagtgaagactgtttatatctaaatgtatggattccagcacctaaaccaaaaaatgccactgtattgatatggatttatggtggtggttttcaaactggaacatcatctttacatgtttatgatggcaagtttctggctcgggttgaaagagttattgtagtgtcaatgaactatagggtgggtgccctaggattcttagctttgccaggaaatcctgaggctccagggaacatgggtttatttgatcaacagttggctcttcagtgggttcaaaaaaatatagcagcctttggtggaaatcctaaaagtgtaactctctttggagaaagtgcaggagcagcttcagttagcctgcatttgctttctcctggaagccattcattgttcaccagagccattctgcaaagtggttccgckaatgctccttgggcggtaacatctctttatgaagctaggaacagaacgttgaacttagctaaattgactggttgctctagagagaatgagactgaaataatcaagtgtcttagaaataaagatccccaagaaattcttctgaatgaagcatttgttgtcccctatgggactcctcattcagtaaactttggtccgaccgtggatggtgattttctcactgacatgccagacatattacttgaacttggacaatttaaaaaaacccagattttggtgggtgttaataaagatgaagggacagcttttttagtctatggtgctcctggcttcagcaaagataacaatagtatcataactagaaaagaatttcaggaaggtttaaaaatattttttccaggagtgagtgagtttggaaaggaatccatcctttttcattacacagactgggtagatgatcagagacctgaaaactaccgtgaggccttgggtgatgttgttggggattataatttcatatgccctgccttggagttcaccaagaagttctcagaatggggaaataatgcctttttctactattttgaacaccgatcctccaaacttccgtggccagaatggatgggagtgatgcatggctatgaaattgaatttgtctttggtttacctctggaaagaagagataattacacaaaagccgaggaaattttgagtagatccatagtgaaacggtgggcaaattttgcaaaatatgggaatccaaatgagactcagaacaatagcacaagctggcctgtcttcaaaagcactgaacaaaaatatctaaccttgaatacagagtcaacaagaataatgacgaaactacgtgctcaacaatgtcgattctggacatcattttttccaaaagtcttggaaatgacaggaaatattgatgaagcagaatgggagtggaaagcaggattccatcgctggaacaattacatgatggactggaaaaatcaatttaacgattacactagcaagaaagaaagttgtgtgggtctc

SEQ ID NO: 10 - protein, 574 aa, Artificial
  Synthetic butyrylcholinesterase variant
  VARIANT (227)..(227): Xaa = Ala
  VARIANT (286)..(286): L286H
EDDIIIATKNGKVRGMNLTVFGGTVTAFLGIPYAQPPLGRLRFKKPQSLTKWSDIWNATKYANSCCQNIDQSFPGFHGSEMWNPNTDLSEDCLYLNVWIPAPKPKNATVLIWIYGGGFQTGTSSLHVYDGKFLARVERVIVVSMNYRVGALGFLALPGNPEAPGNMGLFDQQLALQWVQKNIAAFGGNPKSVTLFGESAGAASVSLHLLSPGSHSLFTRAILQSGSXNAPWAVTSLYEARNRTLNLAKLTGCSRENETEIIKCLRNKDPQEILLNEAFVVPYGTPHSVNFGPTVDGDFLTDMPDILLELGQFKKTQILVGVNKDEGTAFLVYGAPGFSKDNNSIITRKEFQEGLKIFFPGVSEFGKESILFHYTDWVDDQRPENYREALGDVVGDYNFICPALEFTKKFSEWGNNAFFYYFEHRSSKLPWPEWMGVMHGYEIEFVFGLPLERRDNYTKAEEILSRSIVKRWANFAKYGNPNETQNNSTSWPVFKSTEQKYLTLNTESTRIMTKLRAQQCRFWTSFFPKVLEMTGNIDEAEWEWKAGFHRWNNYMMDWKNQFNDYTSKKESCVGL

SEQ ID NO: 11 - DNA, 1722 bp, Artificial
  Synthetic butyrylcholinesterase variant
gaagatgacatcataattgcaacaaagaatggaaaagtcagagggatgaacttgacagtttttggtggcacggtaacagcctttcttggaattccctatgcacagccacctcttggtagacttcgattcaaaaagccacagtctctgaccaagtggtctgatatttggaatgccacaaaatatgcaaattcttgctgtcagaacatagatcaaagttttccaggcttccatggatcagagatgtggaacccaaacactgacctcagtgaagactgtttatatctaaatgtatggattccagcacctaaaccaaaaaatgccactgtattgatatggatttatggtggtggttttcaaactggaacatcatctttacatgtttatgatggcaagtttctggctcgggttgaaagagttattgtagtgtcaatgaactatagggtgggtgccctaggattcttagctttgccaggaaatcctgaggctccagggaacatgggtttatttgatcaacagttggctcttcagtgggttcaaaaaaatatagcagcctttggtggaaatcctaaaagtgtaactctctttggagaaagtgcaggagcagcttcagttagcctgcatttgctttctcctggaagccattcattgttcaccagagccattctgcaaagtggttccgcgaatgctccttgggcggtaacatctctttatgaagctaggaacagaacgttgaacttagctaaattgactggttgctctagagagaatgagactgaaataatcaagtgtcttagaaataaagatccccaagaaattcttctgaatgaagcatttgttgtcccctatgggactccttggtcagtaaactttggtccgaccgtggatggtgattttctcactgacatgccagacatattacttgaacttggacaatttaaaaaaacccagattttggtgggtgttaataaagatgaagggacagcttttttagtctatggtgctcctggcttcagcaaagataacaatagtatcataactagaaaagaatttcaggaaggtttaaaaatattttttccaggagtgagtgagtttggaaaggaatccatcctttttcattacacagactgggtagatgatcagagacctgaaaactaccgtgaggccttgggtgatgttgttggggattataatttcatatgccctgccttggagttcaccaagaagttctcagaatggggaaataatgcctttttctactattttgaacaccgatcctccaaacttccgtggccagaatggatgggagtgatgcatggctatgaaattgaatttgtctttggtttacctctggaaagaagagataattacacaaaagccgaggaaattttgagtagatccatagtgaaacggtgggcaaattttgcaaaatatgggaatccaaatgagactcagaacaatagcacaagctggcctgtcttcaaaagcactgaacaaaaatatctaaccttgaatacagagtcaacaagaataatgacgaaactacgtgctcaacaatgtcgattctggacatcattttttccaaaagtcttggaaatgacaggaaatattgatgaagcagaatgggagtggaaagcaggattccatcgctggaacaattacatgatggactggaaaaatcaatttaacgattacactagcaagaaagaaagttgtgtgggtctc

SEQ ID NO: 12 - protein, 574 aa, Artificial
  Synthetic butyrylcholinesterase variant
  VARIANT (227)..(227): F227A
  VARIANT (286)..(286): L286W
EDDIIIATKNGKVRGMNLTVFGGTVTAFLGIPYAQPPLGRLRFKKPQSLTKWSDIWNATKYANSCCQNIDQSFPGFHGSEMWNPNTDLSEDCLYLNVWIPAPKPKNATVLIWIYGGGFQTGTSSLHVYDGKFLARVERVIVVSMNYRVGALGFLALPGNPEAPGNMGLFDQQLALQWVQKNIAAFGGNPKSVTLFGESAGAASVSLHLLSPGSHSLFTRAILQSGSANAPWAVTSLYEARNRTLNLAKLTGCSRENETEIIKCLRNKDPQEILLNEAFVVPYGTPWSVNFGPTVDGDFLTDMPDILLELGQFKKTQILVGVNKDEGTAFLVYGAPGFSKDNNSIITRKEFQEGLKIFFPGVSEFGKESILFHYTDWVDDQRPENYREALGDVVGDYNFICPALEFTKKFSEWGNNAFFYYFEHRSSKLPWPEWMGVMHGYEIEFVFGLPLERRDNYTKAEEILSRSIVKRWANFAKYGNPNETQNNSTSWPVFKSTEQKYLTLNTESTRIMTKLRAQQCRFWTSFFPKVLEMTGNIDEAEWEWKAGFHRWNNYMMDWKNQFNDYTSKKESCVGL

SEQ ID NO: 13 - DNA, 1722 bp, Artificial
  Synthetic butyrylcholinesterase variant
gaagatgacatcataattgcaacaaagaatggaaaagtcagagggatgaacttgacagtttttggtggcacggtaacagcctttcttggaattccctatgcacagccacctcttggtagacttcgattcaaaaagccacagtctctgaccaagtggtctgatatttggaatgccacaaaatatgcaaattcttgctgtcagaacatagatcaaagttttccaggcttccatggatcagagatgtggaacccaaacactgacctcagtgaagactgtttatatctaaatgtatggattccagcacctaaaccaaaaaatgccactgtattgatatggatttatggtggtggttttcaaactggaacatcatctttacatgtttatgatggcaagtttctggctcgggttgaaagagttattgtagtgtcaatgaactatagggtgggtgccctaggattcttagctttgccaggaaatcctgaggctccagggaacatgggtttatttgatcaacagttggctcttcagtgggttcaaaaaaatatagcagcctttggtggaaatcctaaaagtgtaactctctttggagaaagtgcaggagcagcttcagttagcctgcatttgctttctcctggaagccattcattgttcaccagagccattctgcaaagtggttccgcgaatgctccttgggcggtaacatctctttatgaagctaggaacagaacgttgaacttagctaaattgactggttgctctagagagaatgagactgaaataatcaagtgtcttagaaataaagatccccaagaaattcttctgaatgaagcatttgttgtcccctatgggactcctttgcckgtaaactttggtccgaccgtggatggtgattttctcactgacatgccagacatattacttgaacttggacaatttaaaaaaacccagattttggtgggtgttaataaagatgaagggacagcttttttagtctatggtgctcctggcttcagcaaagataacaatagtatcataactagaaaagaatttcaggaaggtttaaaaatattttttccaggagtgagtgagtttggaaaggaatccatcctttttcattacacagactgggtagatgatcagagacctgaaaactaccgtgaggccttgggtgatgttgttggggattataatttcatatgccctgccttggagttcaccaagaagttctcagaatggggaaataatgcctttttctactattttgaacaccgatcctccaaacttccgtggccagaatggatgggagtgatgcatggctatgaaattgaatttgtctttggtttacctctggaaagaagagataattacacaaaagccgaggaaattttgagtagatccatagtgaaacggtgggcaaattttgcaaaatatgggaatccaaatgagactcagaacaatagcacaagctggcctgtcttcaaaagcactgaacaaaaatatctaaccttgaatacagagtcaacaagaataatgacgaaactacgtgctcaacaatgtcgattctggacatcattttttccaaaagtcttggaaatgacaggaaatattgatgaagcagaatgggagtggaaagcaggattccatcgctggaacaattacatgatggactggaaaaatcaatttaacgattacactagcaagaaagaaagttgtgtgggtctc

SEQ ID NO: 14 - protein, 574 aa, Artificial
  Synthetic butyrylcholinesterase variant
  VARIANT (227)..(227): F227A
  VARIANT (287)..(287): Xaa = Pro
EDDIIIATKNGKVRGMNLTVFGGTVTAFLGIPYAQPPLGRLRFKKPQSLTKWSDIWNATKYANSCCQNIDQSFPGFHGSEMWNPNTDLSEDCLYLNVWIPAPKPKNATVLIWIYGGGFQTGTSSLHVYDGKFLARVERVIVVSMNYRVGALGFLALPGNPEAPGNMGLFDQQLALQWVQKNIAAFGGNPKSVTLFGESAGAASVSLHLLSPGSHSLFTRAILQSGSANAPWAVTSLYEARNRTLNLAKLTGCSRENETEIIKCLRNKDPQEILLNEAFVVPYGTPLXVNFGPTVDGDFLTDMPDILLELGQFKKTQILVGVNKDEGTAFLVYGAPGFSKDNNSIITRKEFQEGLKIFFPGVSEFGKESILFHYTDWVDDQRPENYREALGDVVGDYNFICPALEFTKKFSEWGNNAFFYYFEHRSSKLPWPEWMGVMHGYEIEFVFGLPLERRDNYTKAEEILSRSIVKRWANFAKYGNPNETQNNSTSWPVFKSTEQKYLTLNTESTRIMTKLRAQQCRFWTSFFPKVLEMTGNIDEAEWEWKAGFHRWNNYMMDWKNQFNDYTSKKESCVGL

SEQ ID NO: 15 - DNA, 1722 bp, Artificial
  Synthetic butyrylcholinesterase variant
gaagatgacatcataattgcaacaaagaatggaaaagtcagagggatgaacttgacagtttttggtggcacggtaacagcctttcttggaattccctatgcacagccacctcttggtagacttcgattcaaaaagccacagtctctgaccaagtggtctgatatttggaatgccacaaaatatgcaaattcttgctgtcagaacatagatcaaagttttccaggcttccatggatcagagatgtggaacccaaacactgacctcagtgaagactgtttatatctaaatgtatggattccagcacctaaaccaaaaaatgccactgtattgatatggatttatggtggtggttttcaaactggaacatcatctttacatgtttatgatggcaagtttctggctcgggttgaaagagttattgtagtgtcaatgaactatagggtgggtgccctaggattcttagctttgccaggaaatcctgaggctccagggaacatgggtttatttgatcaacagttggctcttcagtgggttcaaaaaaatatagcagcctttggtggaaatcctaaaagtgtaactctctttggagaaagtgcaggagcagcttcagttagcctgcatttgctttctcctggaagccattcattgttcaccagagccattctgcaaagtggttccgcgaatgctccttgggcggtaacatctctttatgaagctaggaacagaacgttgaacttagctaaattgactggttgctctagagagaatgagactgaaataatcaagtgtcttagaaataaagatccccaagaaattcttctgaatgaagcatttgttgtcccctatgggactcctttgggtgtaaactttggtccgaccgtggatggtgattttctcactgacatgccagacatattacttgaacttggacaatttaaaaaaacccagattttggtgggtgttaataaagatgaagggacatggtttttagtcatgggtgctcctggcttcagcaaagataacaatagtatcataactagaaaagaatttcaggaaggtttaaaaatattttttccaggagtgagtgagtttggaaaggaatccatcctttttcattacacagactgggtagatgatcagagacctgaaaactaccgtgaggccttgggtgatgttgttggggattataatttcatatgccctgccttggagttcaccaagaagttctcagaatggggaaataatgcctttttctactattttgaacaccgatcctccaaacttccgtggccagaatggatgggagtgatgcatggctatgaaattgaatttgtctttggtttacctctggaaagaagagataattacacaaaagccgaggaaattttgagtagatccatagtgaaacggtgggcaaattttgcaaaatatgggaatccaaatgagactcagaacaatagcacaagctggcctgtcttcaaaagcactgaacaaaaatatctaaccttgaatacagagtcaacaagaataatgacgaaactacgtgctcaacaatgtcgattctggacatcattttttccaaaagtcttggaaatgacaggaaatattgatgaagcagaatgggagtggaaagcaggattccatcgctggaacaattacatgatggactggaaaaatcaatttaacgattacactagcaagaaagaaagttgtgtgggtctc

SEQ ID NO: 16 - protein, 574 aa, Artificial
  Synthetic butyrylcholinesterase variant
  VARIANT (227)..(227): F227A
  VARIANT (287)..(287): S287G
  VARIANT (328)..(328): A328W
  VARIANT (332)..(332): Y332M
EDDIIIATKNGKVRGMNLTVFGGTVTAFLGIPYAQPPLGRLRFKKPQSLTKWSDIWNATKYANSCCQNIDQSFPGFHGSEMWNPNTDLSEDCLYLNVWIPAPKPKNATVLIWIYGGGFQTGTSSLHVYDGKFLARVERVIVVSMNYRVGALGFLALPGNPEAPGNMGLFDQQLALQWVQKNIAAFGGNPKSVTLFGESAGAASVSLHLLSPGSHSLFTRAILQSGSANAPWAVTSLYEARNRTLNLAKLTGCSRENETEIIKCLRNKDPQEILLNEAFVVPYGTPLGVNFGPTVDGDFLTDMPDILLELGQFKKTQILVGVNKDEGTWFLVMGAPGFSKDNNSIITRKEFQEGLKIFFPGVSEFGKESILFHYTDWVDDQRPENYREALGDVVGDYNFICPALEFTKKFSEWGNNAFFYYFEHRSSKLPWPEWMGVMHGYEIEFVFGLPLERRDNYTKAEEILSRSIVKRWANFAKYGNPNETQNNSTSWPVFKSTEQKYLTLNTESTRIMTKLRAQQCRFWTSFFPKVLEMTGNIDEAEWEWKAGFHRWNNYMMDWKNQFNDYTSKKESCVGL

SEQ ID NO: 17 - DNA, 711 bp, Mus sp.
  misc_feature (1)..(711): Mouse anti-EGFR antibody variable light chain
atggacatgagggtccccgctcagctcctggggctcctgctgctctggctcccaggtgccaaatgtgacatcttgctgactcagtctccagtcatcctgtctgtgagtccaggagaaagagtcagtttctcctgcagggccagtcagagtattggcacaaacatacactggtatcagcaaagaacaaatggttctccaaggcttctcataaagtatgcttctgagtctatctctgggatcccttccaggtttagtggcagtggatcagggacagattttactcttagcatcaacagtgtggagtctgaagatattgcagattattactgtcaacaaaataataactggccaaccacgttcggtgctgggaccaagctggagctgaaacgaactgtggctgcaccatctgtcttcatcttcccgccatctgatgagcagttgaaatctggaactgcctctgttgtgtgcctgctgaataacttctatcccagagaggccaaagtacagtggaaggtggataacgccctccaatcgggtaactcccaggagagtgtcacagagcaggacagcaaggacagcacctacagcctcagcagcaccctgacgctgagcaaagcagactacgagaaacacaaagtctacgcctgcgaagtcacccatcagggcctgagctcgcccgtcacaaagagcttcaacaggggagagtgttag

SEQ ID NO: 18 - protein, 236 aa, Mus sp.
  MISC_FEATURE (1)..(236): Mouse anti-EGFR antibody variable light chain
MDMRVPAQLLGLLLLWLPGAKCDILLTQSPVILSVSPGERVSFSCRASQSIGTNIHWYQQRTNGSPRLLIKYASESISGIPSRFSGSGSGTDFTLSINSVESEDIADYYCQQNNNWPTTFGAGTKLELKRTVAAPSVFIFPPSDEQLKSGTASVVCLLNNFYPREAKVQWKVDNALQSGNSQESVTEQDSKDSTYSLSSTLTLSKADYEKHKVYACEVTHQGLSSPVTKSFNRGEC

SEQ ID NO: 19 - DNA, 2349 bp, Artificial
  Synthetic butyrylcholinesterase variant
  misc_feature (1)..(2349): Mouse anti-EGFR antibody variable heavy chain and constant heavy chain hinge region of L530
atgggatggagctgtatcatcctcttcttggtagcaacagctacaggtgtccactcccaggtgcagctgaagcagtcaggacctggcctagtgcagccctcacagagcctgtccatcacctgcacagtctctggtttctcattaactaactatggtgtacactgggttcgccagtctccaggaaagggtctggagtggctgggagtgatatggagtggtggaaacacagactataatacacctttcacatccagactgagcatcaacaaggacaattccaagagccaagttttctttaaaatgaacagtctgcaatctaatgacacagccatatattactgtgccagagccctcacctactatgattacgagtttgcttactggggccaagggactctggtcactgtctctgcagcctccaccaagggcccatcggtcttccccctggcaccctcctccaagagcacctctgggggcacagcggccctgggctgcctggtcaaggactacttccccgaaccggtgacggtgtcgtggaactcaggcgccctgaccagcggcgtgcacaccttcccggctgtcctacagtcctcaggactctactccctcagcagcgtggtgaccgtgccctccagcagcttgggcacccagacctacatctgcaacgtgaatcacaagcccagcaacaccaaggtggacaagaaagcagagcccaaatcttgtgacaaaactcacacatgtccaccgtgtccaaagcttgaagatgacatcataattgcaacaaagaatggaaaagtcagagggatgaacttgacagtttttggtggcacggtaacagcctttcttggaattccctatgcacagccacctcttggtagacttcgattcaaaaagccacagtctctgaccaagtggtctgatatttggaatgccacaaaatatgcaaattcttgctgtcagaacatagatcaaagttttccaggcttccatggatcagagatgtggaacccaaacactgacctcagtgaagactgtttatatctaaatgtatggattccagcacctaaaccaaaaaatgccactgtattgatatggatttatggtggtggttttcaaactggaacatcatctttacatgtttatgatggcaagtttctggctcgggttgaaagagttattgtagtgtcaatgaactatagggtgggtgccctaggattcttagctttgccaggaaatcctgaggctccagggaacatgggtttatttgatcaacagttggctcttcagtgggttcaaaaaaatatagcagcctttggtggaaatcctaaaagtgtaactctctttggagaaagtgcaggagcagcttcagttagcctgcatttgctttctcctggaagccattcattgttcaccagagccattctgcaaagtggttcctttaatgctccttgggcggtaacatctctttatgaagctaggaacagaacgttgaacttagctaaattgactggttgctctagagagaatgagactgaaataatcaagtgtcttagaaataaagatccccaagaaattcttctgaatgaagcatttgttgtcccctatgggactcctttgtcagtaaactttggtccgaccgtggatggtgattttctcactgacatgccagacatattacttgaacttggacaatttaaaaaaacccagattttggtgggtgttaataaagatgaagggacagcttttttagtctatggtgctcctggcttcagcaaagataacaatagtatcataactagaaaagaatttcaggaaggtttaaaaatattttttccaggagtgagtgagtttggaaaggaatccatcctttttcattacacagactgggtagatgatcagagacctgaaaactaccgtgaggccttgggtgatgttgttggggattataatttcatatgccctgccttggagttcaccaagaagttctcagaatggggaaataatgcctttttctactattttgaacaccgatcctccaaacttccgtggccagaatggatgggagtgatgcatggctatgaaattgaatttgtctttggtttacctctggaaagaagagataattacacaaaagccgaggaaattttgagtagatccatagtgaaacggtgggcaaattttgcaaaatatgggaatccaaatgagactcagaacaatagcacaagctggcctgtcttcaaaagcactgaacaaaaatatctaaccttgaatacagagtcaacaagaataatgacgaaactacgtgctcaacaatgtcgattctggacatcattttttccaaaagtctga

SEQ ID NO: 20 - protein, 782 aa, Artificial
  Synthetic butyrylcholinesterase variant
  MISC_FEATURE (1)..(782): Mouse anti-EGFR antibody variable heavy chain and constant heavy chain hinge region of L530
MGWSCIILFLVATATGVHSQVQLKQSGPGLVQPSQSLSITCTVSGFSLTNYGVHWVRQSPGKGLEWLGVIWSGGNTDYNTPFTSRLSINKDNSKSQVFFKMNSLQSNDTAIYYCARALTYYDYEFAYWGQGTLVTVSAASTKGPSVFPLAPSSKSTSGGTAALGCLVKDYFPEPVTVSWNSGALTSGVHTFPAVLQSSGLYSLSSVVTVPSSSLGTQTYICNVNHKPSNTKVDKKAEPKSCDKTHTCPPCPKLEDDIIIATKNGKVRGMNLTVFGGTVTAFLGIPYAQPPLGRLRFKKPQSLTKWSDIWNATKYANSCCQNIDQSFPGFHGSEMWNPNTDLSEDCLYLNVWIPAPKPKNATVLIWIYGGGFQTGTSSLHVYDGKFLARVERVIVVSMNYRVGALGFLALPGNPEAPGNMGLFDQQLALQWVQKNIAAFGGNPKSVTLFGESAGAASVSLHLLSPGSHSLFTRAILQSGSFNAPWAVTSLYEARNRTLNLAKLTGCSRENETEIIKCLRNKDPQEILLNEAFVVPYGTPLSVNFGPTVDGDFLTDMPDILLELGQFKKTQILVGVNKDEGTAFLVYGAPGFSKDNNSIITRKEFQEGLKIFFPGVSEFGKESILFHYTDWVDDQRPENYREALGDVVGDYNFICPALEFTKKFSEWGNNAFFYYFEHRSSKLPWPEWMGVMHGYEIEFVFGLPLERRDNYTKAEEILSRSIVKRWANFAKYGNPNETQNNSTSWPVFKSTEQKYLTLNTESTRIMTKLRAQQCRFWTSFFPKV

SEQ ID NO: 21 - DNA, 1722 bp, Homo sapiens
  misc_feature (1)..(1722): Human butyrylcholinesterase
gaagatgacatcataattgcaacaaagaatggaaaagtcagagggatgaacttgacagtttttggtggcacggtaacagcctttcttggaattccctatgcacagccacctcttggtagacttcgattcaaaaagccacagtctctgaccaagtggtctgatatttggaatgccacaaaatatgcaaattcttgctgtcagaacatagatcaaagttttccaggcttccatggatcagagatgtggaacccaaacactgacctcagtgaagactgtttatatctaaatgtatggattccagcacctaaaccaaaaaatgccactgtattgatatggatttatggtggtggttttcaaactggaacatcatctttacatgtttatgatggcaagtttctggctcgggttgaaagagttattgtagtgtcaatgaactatagggtgggtgccctaggattcttagctttgccaggaaatcctgaggctccagggaacatgggtttatttgatcaacagttggctcttcagtgggttcaaaaaaatatagcagcctttggtggaaatcctaaaagtgtaactctctttggagaaagtgcaggagcagcttcagttagcctgcatttgctttctcctggaagccattcattgttcaccagagccattctgcaaagtggttcctttaatgctccttgggcggtaacatctctttatgaagctaggaacagaacgttgaacttagctaaattgactggttgctctagagagaatgagactgaaataatcaagtgtcttagaaataaagatccccaagaaattcttctgaatgaagcatttgttgtcccctatgggactcctttgtcagtaaactttggtccgaccgtggatggtgattttctcactgacatgccagacatattacttgaacttggacaatttaaaaaaacccagattttggtgggtgttaataaagatgaagggacagcttttttagtctatggtgctcctggcttcagcaaagataacaatagtatcataactagaaaagaatttcaggaaggtttaaaaatattttttccaggagtgagtgagtttggaaaggaatccatcctttttcattacacagactgggtagatgatcagagacctgaaaactaccgtgaggccttgggtgatgttgttggggattataatttcatatgccctgccttggagttcaccaagaagttctcagaatggggaaataatgcctttttctactattttgaacaccgatcctccaaacttccgtggccagaatggatgggagtgatgcatggctatgaaattgaatttgtctttggtttacctctggaaagaagagataattacacaaaagccgaggaaattttgagtagatccatagtgaaacggtgggcaaattttgcaaaatatgggaatccaaatgagactcagaacaatagcacaagctggcctgtcttcaaaagcactgaacaaaaatatctaaccttgaatacagagtcaacaagaataatgacgaaactacgtgctcaacaatgtcgattctggacatcattttttccaaaagtcttggaaatgacaggaaatattgatgaagcagaatgggagtggaaagcaggattccatcgctggaacaattacatgatggactggaaaaatcaatttaacgattacactagcaagaaagaaagttgtgtgggtctc

SEQ ID NO: 22 - protein, 574 aa, Homo sapiens
  MISC_FEATURE (1)..(574): Human butyrylcholinesterase
EDDIIIATKNGKVRGMNLTVFGGTVTAFLGIPYAQPPLGRLRFKKPQSLTKWSDIWNATKYANSCCQNIDQSFPGFHGSEMWNPNTDLSEDCLYLNVWIPAPKPKNATVLIWIYGGGFQTGTSSLHVYDGKFLARVERVIVVSMNYRVGALGFLALPGNPEAPGNMGLFDQQLALQWVQKNIAAFGGNPKSVTLFGESAGAASVSLHLLSPGSHSLFTRAILQSGSFNAPWAVTSLYEARNRTLNLAKLTGCSRENETEIIKCLRNKDPQEILLNEAFVVPYGTPLSVNFGPTVDGDFLTDMPDILLELGQFKKTQILVGVNKDEGTAFLVYGAPGFSKDNNSIITRKEFQEGLKIFFPGVSEFGKESILFHYTDWVDDQRPENYREALGDVVGDYNFICPALEFTKKFSEWGNNAFFYYFEHRSSKLPWPEWMGVMHGYEIEFVFGLPLERRDNYTKAEEILSRSIVKRWANFAKYGNPNETQNNSTSWPVFKSTEQKYLTLNTESTRIMTKLRAQQCRFWTSFFPKVLEMTGNIDEAEWEWKAGFHRWNNYMMDWKNQFNDYTSKKESCVGL

SEQ ID NO: 23 - DNA, 1722 bp, Artificial
  Synthetic butyrylcholinesterase variant
gaagatgacatcataattgcaacaaagaatggaaaagtcagagggatgaacttgacagtttttggtggcacggtaacagcctttcttggaattccctatgcacagccacctcttggtagacttcgattcaaaaagccacagtctctgaccaagtggtctgatatttggaatgccacaaaatatgcaaattcttgctgtcagaagatagatcaaagttttccaggcttccatggatcagagatgtggaacccaaacactgacctcagtgaagactgtttatatctaaatgtatggattccagcacctaaaccaaaaaatgccactgtattgatatggatttatggtggtggttttcaaactggaacatcatctttacatgtttatgatggcaagtttctggctcgggttgaaagagttattgtagtgtcaatgaactatagggtgggtgccctaggattcttagctttgccaggaaatcctgaggctccagggaacatgggtttatttgatcaacagttggctcttcagtgggttcaaaaaaatatagcagcctttggtggaaatcctaaaagtgtaactctctttggagaaagtgcaggagcagcttcagttagcctgcatttgctttctcctggaagccattcattgttcaccagagccattctgcaaagtggttccgckaatgctccttgggcggtaacatctctttatgaagctaggaacagaacgttgaacttagctaaattgactggttgctctagagagaatgagactgaaataatcaagtgtcttagaaataaagatccccaagaaattcttctgaatgaagcatttgttgtcccctatgggactcctttgtcagtaaactttggtccgaccgtggatggtgattttctcactgacatgccagacatattacttgaacttggacaatttaaaaaaacccagattttggtgggtgttaataaagatgaagggacagcttttttagtctatggtgctcctggcttcagcaaagataacaatagtatcataactagaaaagaatttcaggaaggtttaaaaatattttttccaggagtgagtgagtttggaaaggaatccatcctttttcattacacagactgggtagatgatcagagacctgaaaactaccgtgaggccttgggtgatgttgttggggattataatttcatatgccctgccttggagttcaccaagaagttctcagaatggggaaataatgcctttttctactattttgaacaccgatcctccaaacttccgtggccagaatggatgggagtgatgcatggctatgaaattgaatttgtctttggtttacctctggaaagaagagataattacacaaaagccgaggaaattttgagtagatccatagtgaaacggtgggcaaattttgcaaaatatgggaatccaaatgagactcagaacaatagcacaagctggcctgtcttcaaaagcactgaacaaaaatatctaaccttgaatacagagtcaacaagaataatgacgaaactacgtgctcaacaatgtcgattctggacatcattttttccaaaagtcttggaaatgacaggaaatattgatgaagcagaatgggagtggaaagcaggattccatcgctggaacaattacatgatggactggaaaaatcaatttaacgattacactagcaagaaagaaagttgtgtgggtctc

SEQ ID NO: 24 - protein, 574 aa, Artificial
  Synthetic butyrylcholinesterase variant
  VARIANT (68)..(68): N68K
  VARIANT (227)..(227): Xaa = Ala
EDDIIIATKNGKVRGMNLTVFGGTVTAFLGIPYAQPPLGRLRFKKPQSLTKWSDIWNATKYANSCCQKIDQSFPGFHGSEMWNPNTDLSEDCLYLNVWIPAPKPKNATVLIWIYGGGFQTGTSSLHVYDGKFLARVERVIVVSMNYRVGALGFLALPGNPEAPGNMGLFDQQLALQWVQKNIAAFGGNPKSVTLFGESAGAASVSLHLLSPGSHSLFTRAILQSGSXNAPWAVTSLYEARNRTLNLAKLTGCSRENETEIIKCLRNKDPQEILLNEAFVVPYGTPLSVNFGPTVDGDFLTDMPDILLELGQFKKTQILVGVNKDEGTAFLVYGAPGFSKDNNSIITRKEFQEGLKIFFPGVSEFGKESILFHYTDWVDDQRPENYREALGDVVGDYNFICPALEFTKKFSEWGNNAFFYYFEHRSSKLPWPEWMGVMHGYEIEFVFGLPLERRDNYTKAEEILSRSIVKRWANFAKYGNPNETQNNSTSWPVFKSTEQKYLTLNTESTRIMTKLRAQQCRFWTSFFPKVLEMTGNIDEAEWEWKAGFHRWNNYMMDWKNQFNDYTSKKESCVGL

SEQ ID NO: 25 - DNA, 1722 bp, Artificial
  Synthetic butyrylcholinesterase variant
gaagatgacatcataattgcaacaaagaatggaaaagtcagagggatgaacttgacagtttttggtggcacggtaacagcctttcttggaattccctatgcacagccacctcttggtagacttcgattcaaaaagccacagtctctgaccaagtggtctgatatttggaatgccacaaaatatgcaaattcttgctgtcagcggatagatcaaagttttccaggcttccatggatcagagatgtggaacccaaacactgacctcagtgaagactgtttatatctaaatgtatggattccagcacctaaaccaaaaaatgccactgtattgatatggatttatggtggtggttttcaaactggaacatcatctttacatgtttatgatggcaagtttctggctcgggttgaaagagttattgtagtgtcaatgaactatagggtgggtgccctaggattcttagctttgccaggaaatcctgaggctccagggaacatgggtttatttgatcaacagttggctcttcagtgggttcaaaaaaatatagcagcctttggtggaaatcctaaaagtgtaactctctttggagaaagtgcaggagcagcttcagttagcctgcatttgctttctcctggaagccattcattgttcaccagagccattctgcaaagtggttccgckaatgctccttgggcggtaacatctctttatgaagctaggaacagaacgttgaacttagctaaattgactggttgctctagagagaatgagactgaaataatcaagtgtcttagaaataaagatccccaagaaattcttctgaatgaagcatttgttgtcccctatgggactcctttgtcagtaaactttggtccgaccgtggatggtgattttctcactgacatgccagacatattacttgaacttggacaatttaaaaaaacccagattttggtgggtgttaataaagatgaagggacagcttttttagtctatggtgctcctggcttcagcaaagataacaatagtatcataactagaaaagaatttcaggaaggtttaaaaatattttttccaggagtgagtgagtttggaaaggaatccatcctttttcattacacagactgggtagatgatcagagacctgaaaactaccgtgaggccttgggtgatgttgttggggattataatttcatatgccctgccttggagttcaccaagaagttctcagaatggggaaataatgcctttttctactattttgaacaccgatcctccaaacttccgtggccagaatggatgggagtgatgcatggctatgaaattgaatttgtctttggtttacctctggaaagaagagataattacacaaaagccgaggaaattttgagtagatccatagtgaaacggtgggcaaattttgcaaaatatgggaatccaaatgagactcagaacaatagcacaagctggcctgtcttcaaaagcactgaacaaaaatatctaaccttgaatacagagtcaacaagaataatgacgaaactacgtgctcaacaatgtcgattctggacatcattttttccaaaagtcttggaaatgacaggaaatattgatgaagcagaatgggagtggaaagcaggattccatcgctggaacaattacatgatggactggaaaaatcaatttaacgattacactagcaagaaagaaagttgtgtgggtctc

SEQ ID NO: 26 - protein, 574 aa, Artificial
  Synthetic butyrylcholinesterase variant
  VARIANT (68)..(68): N68R
  VARIANT (227)..(227): Xaa = Ala
EDDIIIATKNGKVRGMNLTVFGGTVTAFLGIPYAQPPLGRLRFKKPQSLTKWSDIWNATKYANSCCQRIDQSFPGFHGSEMWNPNTDLSEDCLYLNVWIPAPKPKNATVLIWIYGGGFQTGTSSLHVYDGKFLARVERVIVVSMNYRVGALGFLALPGNPEAPGNMGLFDQQLALQWVQKNIAAFGGNPKSVTLFGESAGAASVSLHLLSPGSHSLFTRAILQSGSXNAPWAVTSLYEARNRTLNLAKLTGCSRENETEIIKCLRNKDPQEILLNEAFVVPYGTPLSVNFGPTVDGDFLTDMPDILLELGQFKKTQILVGVNKDEGTAFLVYGAPGFSKDNNSIITRKEFQEGLKIFFPGVSEFGKESILFHYTDWVDDQRPENYREALGDVVGDYNFICPALEFTKKFSEWGNNAFFYYFEHRSSKLPWPEWMGVMHGYEIEFVFGLPLERRDNYTKAEEILSRSIVKRWANFAKYGNPNETQNNSTSWPVFKSTEQKYLTLNTESTRIMTKLRAQQCRFWTSFFPKVLEMTGNIDEAEWEWKAGFHRWNNYMMDWKNQFNDYTSKKESCVGL

SEQ ID NO: 27 - DNA, 1722 bp, Artificial
  Synthetic butyrylcholinesterase variant
gaagatgacatcataattgcaacaaagaatggaaaagtcagagggatgaacttgacagtttttggtggcacggtaacagcctttcttggaattccctatgcacagccacctcttggtagacttcgattcaaaaagccacagtctctgaccaagtggtctgatatttggaatgccacaaaatatgcaaattcttgctgtcagaacatagggcaaagttttccaggcttccatggatcagagatgtggaacccaaacactgacctcagtgaagactgtttatatctaaatgtatggattccagcacctaaaccaaaaaatgccactgtattgatatggatttatggtggtggttttcaaactggaacatcatctttacatgtttatgatggcaagtttctggctcgggttgaaagagttattgtagtgtcaatgaactatagggtgggtgccctaggattcttagctttgccaggaaatcctgaggctccagggaacatgggtttatttgatcaacagttggctcttcagtgggttcaaaaaaatatagcagcctttggtggaaatcctaaaagtgtaactctctttggagaaagtgcaggagcagcttcagttagcctgcatttgctttctcctggaagccattcattgttcaccagagccattctgcaaagtggttccgckaatgctccttgggcggtaacatctctttatgaagctaggaacagaacgttgaacttagctaaattgactggttgctctagagagaatgagactgaaataatcaagtgtcttagaaataaagatccccaagaaattcttctgaatgaagcatttgttgtcccctatgggactcctttgtcagtaaactttggtccgaccgtggatggtgattttctcactgacatgccagacatattacttgaacttggacaatttaaaaaaacccagattttggtgggtgttaataaagatgaagggacagcttttttagtctatggtgctcctggcttcagcaaagataacaatagtatcataactagaaaagaatttcaggaaggtttaaaaatattttttccaggagtgagtgagtttggaaaggaatccatcctttttcattacacagactgggtagatgatcagagacctgaaaactaccgtgaggccttgggtgatgttgttggggattataatttcatatgccctgccttggagttcaccaagaagttctcagaatggggaaataatgcctttttctactattttgaacaccgatcctccaaacttccgtggccagaatggatgggagtgatgcatggctatgaaattgaatttgtctttggtttacctctggaaagaagagataattacacaaaagccgaggaaattttgagtagatccatagtgaaacggtgggcaaattttgcaaaatatgggaatccaaatgagactcagaacaatagcacaagctggcctgtcttcaaaagcactgaacaaaaatatctaaccttgaatacagagtcaacaagaataatgacgaaactacgtgctcaacaatgtcgattctggacatcattttttccaaaagtcttggaaatgacaggaaatattgatgaagcagaatgggagtggaaagcaggattccatcgctggaacaattacatgatggactggaaaaatcaatttaacgattacactagcaagaaagaaagttgtgtgggtctc

SEQ ID NO: 28 - protein, 574 aa, Artificial
  Synthetic butyrylcholinesterase variant
  VARIANT (70)..(70): D70G
  VARIANT (227)..(227): Xaa = Ala
EDDIIIATKNGKVRGMNLTVFGGTVTAFLGIPYAQPPLGRLRFKKPQSLTKWSDIWNATKYANSCCQNIGQSFPGFHGSEMWNPNTDLSEDCLYLNVWIPAPKPKNATVLIWIYGGGFQTGTSSLHVYDGKFLARVERVIVVSMNYRVGALGFLALPGNPEAPGNMGLFDQQLALQWVQKNIAAFGGNPKSVTLFGESAGAASVSLHLLSPGSHSLFTRAILQSGSXNAPWAVTSLYEARNRTLNLAKLTGCSRENETEIIKCLRNKDPQEILLNEAFVVPYGTPLSVNFGPTVDGDFLTDMPDILLELGQFKKTQILVGVNKDEGTAFLVYGAPGFSKDNNSIITRKEFQEGLKIFFPGVSEFGKESILFHYTDWVDDQRPENYREALGDVVGDYNFICPALEFTKKFSEWGNNAFFYYFEHRSSKLPWPEWMGVMHGYEIEFVFGLPLERRDNYTKAEEILSRSIVKRWANFAKYGNPNETQNNSTSWPVFKSTEQKYLTLNTESTRIMTKLRAQQCRFWTSFFPKVLEMTGNIDEAEWEWKAGFHRWNNYMMDWKNQFNDYTSKKESCVGL

SEQ ID NO: 29 - DNA, 1722 bp, Artificial
  Synthetic butyrylcholinesterase variant
gaagatgacatcataattgcaacaaagaatggaaaagtcagagggatgaacttgacagtttttggtggcacggtaacagcctttcttggaattccctatgcacagccacctcttggtagacttcgattcaaaaagccacagtctctgaccaagtggtctgatatttggaatgccacaaaatatgcaaattcttgctgtcagaacatacatcaaagttttccaggcttccatggatcagagatgtggaacccaaacactgacctcagtgaagactgtttatatctaaatgtatggattccagcacctaaaccaaaaaatgccactgtattgatatggatttatggtggtggttttcaaactggaacatcatctttacatgtttatgatggcaagtttctggctcgggttgaaagagttattgtagtgtcaatgaactatagggtgggtgccctaggattcttagctttgccaggaaatcctgaggctccagggaacatgggtttatttgatcaacagttggctcttcagtgggttcaaaaaaatatagcagcctttggtggaaatcctaaaagtgtaactctctttggagaaagtgcaggagcagcttcagttagcctgcatttgctttctcctggaagccattcattgttcaccagagccattctgcaaagtggttccgckaatgctccttgggcggtaacatctctttatgaagctaggaacagaacgttgaacttagctaaattgactggttgctctagagagaatgagactgaaataatcaagtgtcttagaaataaagatccccaagaaattcttctgaatgaagcatttgttgtcccctatgggactcctttgtcagtaaactttggtccgaccgtggatggtgattttctcactgacatgccagacatattacttgaacttggacaatttaaaaaaacccagattttggtgggtgttaataaagatgaagggacagcttttttagtctatggtgctcctggcttcagcaaagataacaatagtatcataactagaaaagaatttcaggaaggtttaaaaatattttttccaggagtgagtgagtttggaaaggaatccatcctttttcattacacagactgggtagatgatcagagacctgaaaactaccgtgaggccttgggtgatgttgttggggattataatttcatatgccctgccttggagttcaccaagaagttctcagaatggggaaataatgcctttttctactattttgaacaccgatcctccaaacttccgtggccagaatggatgggagtgatgcatggctatgaaattgaatttgtctttggtttacctctggaaagaagagataattacacaaaagccgaggaaattttgagtagatccatagtgaaacggtgggcaaattttgcaaaatatgggaatccaaatgagactcagaacaatagcacaagctggcctgtcttcaaaagcactgaacaaaaatatctaaccttgaatacagagtcaacaagaataatgacgaaactacgtgctcaacaatgtcgattctggacatcattttttccaaaagtcttggaaatgacaggaaatattgatgaagcagaatgggagtggaaagcaggattccatcgctggaacaattacatgatggactggaaaaatcaatttaacgattacactagcaagaaagaaagttgtgtgggtctc

SEQ ID NO: 30 - protein, 574 aa, Artificial
  Synthetic butyrylcholinesterase variant
  VARIANT (70)..(70): D70H
  VARIANT (227)..(227): Xaa = Ala
EDDIIIATKNGKVRGMNLTVFGGTVTAFLGIPYAQPPLGRLRFKKPQSLTKWSDIWNATKYANSCCQNIHQSFPGFHGSEMWNPNTDLSEDCLYLNVWIPAPKPKNATVLIWIYGGGFQTGTSSLHVYDGKFLARVERVIVVSMNYRVGALGFLALPGNPEAPGNMGLFDQQLALQWVQKNIAAFGGNPKSVTLFGESAGAASVSLHLLSPGSHSLFTRAILQSGSXNAPWAVTSLYEARNRTLNLAKLTGCSRENETEIIKCLRNKDPQEILLNEAFVVPYGTPLSVNFGPTVDGDFLTDMPDILLELGQFKKTQILVGVNKDEGTAFLVYGAPGFSKDNNSIITRKEFQEGLKIFFPGVSEFGKESILFHYTDWVDDQRPENYREALGDVVGDYNFICPALEFTKKFSEWGNNAFFYYFEHRSSKLPWPEWMGVMHGYEIEFVFGLPLERRDNYTKAEEILSRSIVKRWANFAKYGNPNETQNNSTSWPVFKSTEQKYLTLNTESTRIMTKLRAQQCRFWTSFFPKVLEMTGNIDEAEWEWKAGFHRWNNYMMDWKNQFNDYTSKKESCVGL

SEQ ID NO: 31 - DNA, 1722 bp, Artificial
  Synthetic butyrylcholinesterase variant
gaagatgacatcataattgcaacaaagaatggaaaagtcagagggatgaacttgacagtttttggtggcacggtaacagcctttcttggaattccctatgcacagccacctcttggtagacttcgattcaaaaagccacagtctctgaccaagtggtctgatatttggaatgccacaaaatatgcaaattcttgctgtcagaacatagatcaaagttttccaggcttcttcggatcagagatgtggaacccaaacactgacctcagtgaagactgtttatatctaaatgtatggattccagcacctaaaccaaaaaatgccactgtattgatatggatttatggtggtggttttcaaactggaacatcatctttacatgtttatgatggcaagtttctggctcgggttgaaagagttattgtagtgtcaatgaactatagggtgggtgccctaggattcttagctttgccaggaaatcctgaggctccagggaacatgggtttatttgatcaacagttggctcttcagtgggttcaaaaaaatatagcagcctttggtggaaatcctaaaagtgtaactctctttggagaaagtgcaggagcagcttcagttagcctgcatttgctttctcctggaagccattcattgttcaccagagccattctgcaaagtggttccgckaatgctccttgggcggtaacatctctttatgaagctaggaacagaacgttgaacttagctaaattgactggttgctctagagagaatgagactgaaataatcaagtgtcttagaaataaagatccccaagaaattcttctgaatgaagcatttgttgtcccctatgggactcctttgtcagtaaactttggtccgaccgtggatggtgattttctcactgacatgccagacatattacttgaacttggacaatttaaaaaaacccagattttggtgggtgttaataaagatgaagggacagcttttttagtctatggtgctcctggcttcagcaaagataacaatagtatcataactagaaaagaatttcaggaaggtttaaaaatattttttccaggagtgagtgagtttggaaaggaatccatcctttttcattacacagactgggtagatgatcagagacctgaaaactaccgtgaggccttgggtgatgttgttggggattataatttcatatgccctgccttggagttcaccaagaagttctcagaatggggaaataatgcctttttctactattttgaacaccgatcctccaaacttccgtggccagaatggatgggagtgatgcatggctatgaaattgaatttgtctttggtttacctctggaaagaagagataattacacaaaagccgaggaaattttgagtagatccatagtgaaacggtgggcaaattttgcaaaatatgggaatccaaatgagactcagaacaatagcacaagctggcctgtcttcaaaagcactgaacaaaaatatctaaccttgaatacagagtcaacaagaataatgacgaaactacgtgctcaacaatgtcgattctggacatcattttttccaaaagtcttggaaatgacaggaaatattgatgaagcagaatgggagtggaaagcaggattccatcgctggaacaattacatgatggactggaaaaatcaatttaacgattacactagcaagaaagaaagttgtgtgggtctc

SEQ ID NO: 32 - protein, 574 aa, Artificial
  Synthetic butyrylcholinesterase variant
  VARIANT (77)..(77): H77F
  VARIANT (227)..(227): Xaa = Ala
EDDIIIATKNGKVRGMNLTVFGGTVTAFLGIPYAQPPLGRLRFKKPQSLTKWSDIWNATKYANSCCQNIDQSFPGFFGSEMWNPNTDLSEDCLYLNVWIPAPKPKNATVLIWIYGGGFQTGTSSLHVYDGKFLARVERVIVVSMNYRVGALGFLALPGNPEAPGNMGLFDQQLALQWVQKNIAAFGGNPKSVTLFGESAGAASVSLHLLSPGSHSLFTRAILQSGSXNAPWAVTSLYEARNRTLNLAKLTGCSRENETEIIKCLRNKDPQEILLNEAFVVPYGTPLSVNFGPTVDGDFLTDMPDILLELGQFKKTQILVGVNKDEGTAFLVYGAPGFSKDNNSIITRKEFQEGLKIFFPGVSEFGKESILFHYTDWVDDQRPENYREALGDVVGDYNFICPALEFTKKFSEWGNNAFFYYFEHRSSKLPWPEWMGVMHGYEIEFVFGLPLERRDNYTKAEEILSRSIVKRWANFAKYGNPNETQNNSTSWPVFKSTEQKYLTLNTESTRIMTKLRAQQCRFWTSFFPKVLEMTGNIDEAEWEWKAGFHRWNNYMMDWKNQFNDYTSKKESCVGL

SEQ ID NO: 33 - DNA, 1722 bp, Artificial
  Synthetic butyrylcholinesterase variant
gaagatgacatcataattgcaacaaagaatggaaaagtcagagggatgaacttgacagtttttggtggcacggtaacagcctttcttggaattccctatgcacagccacctcttggtagacttcgattcaaaaagccacagtctctgaccaagtggtctgatatttggaatgccacaaaatatgcaaattcttgctgtcagaacatagatcaaagttttccaggcttccctggatcagagatgtggaacccaaacactgacctcagtgaagactgtttatatctaaatgtatggattccagcacctaaaccaaaaaatgccactgtattgatatggatttatggtggtggttttcaaactggaacatcatctttacatgtttatgatggcaagtttctggctcgggttgaaagagttattgtagtgtcaatgaactatagggtgggtgccctaggattcttagctttgccaggaaatcctgaggctccagggaacatgggtttatttgatcaacagttggctcttcagtgggttcaaaaaaatatagcagcctttggtggaaatcctaaaagtgtaactctctttggagaaagtgcaggagcagcttcagttagcctgcatttgctttctcctggaagccattcattgttcaccagagccattctgcaaagtggttccgckaatgctccttgggcggtaacatctctttatgaagctaggaacagaacgttgaacttagctaaattgactggttgctctagagagaatgagactgaaataatcaagtgtcttagaaataaagatccccaagaaattcttctgaatgaagcatttgttgtcccctatgggactcctttgtcagtaaactttggtccgaccgtggatggtgattttctcactgacatgccagacatattacttgaacttggacaatttaaaaaaacccagattttggtgggtgttaataaagatgaagggacagcttttttagtctatggtgctcctggcttcagcaaagataacaatagtatcataactagaaaagaatttcaggaaggtttaaaaatattttttccaggagtgagtgagtttggaaaggaatccatcctttttcattacacagactgggtagatgatcagagacctgaaaactaccgtgaggccttgggtgatgttgttggggattataatttcatatgccctgccttggagttcaccaagaagttctcagaatggggaaataatgcctttttctactattttgaacaccgatcctccaaacttccgtggccagaatggatgggagtgatgcatggctatgaaattgaatttgtctttggtttacctctggaaagaagagataattacacaaaagccgaggaaattttgagtagatccatagtgaaacggtgggcaaattttgcaaaatatgggaatccaaatgagactcagaacaatagcacaagctggcctgtcttcaaaagcactgaacaaaaatatctaaccttgaatacagagtcaacaagaataatgacgaaactacgtgctcaacaatgtcgattctggacatcattttttccaaaagtcttggaaatgacaggaaatattgatgaagcagaatgggagtggaaagcaggattccatcgctggaacaattacatgatggactggaaaaatcaatttaacgattacactagcaagaaagaaagttgtgtgggtctc

SEQ ID NO: 34 - protein, 574 aa, Artificial
  Synthetic butyrylcholinesterase variant
  VARIANT (77)..(77): H77P
  VARIANT (227)..(227): Xaa = Ala
EDDIIIATKNGKVRGMNLTVFGGTVTAFLGIPYAQPPLGRLRFKKPQSLTKWSDIWNATKYANSCCQNIDQSFPGFPGSEMWNPNTDLSEDCLYLNVWIPAPKPKNATVLIWIYGGGFQTGTSSLHVYDGKFLARVERVIVVSMNYRVGALGFLALPGNPEAPGNMGLFDQQLALQWVQKNIAAFGGNPKSVTLFGESAGAASVSLHLLSPGSHSLFTRAILQSGSXNAPWAVTSLYEARNRTLNLAKLTGCSRENETEIIKCLRNKDPQEILLNEAFVVPYGTPLSVNFGPTVDGDFLTDMPDILLELGQFKKTQILVGVNKDEGTAFLVYGAPGFSKDNNSIITRKEFQEGLKIFFPGVSEFGKESILFHYTDWVDDQRPENYREALGDVVGDYNFICPALEFTKKFSEWGNNAFFYYFEHRSSKLPWPEWMGVMHGYEIEFVFGLPLERRDNYTKAEEILSRSIVKRWANFAKYGNPNETQNNSTSWPVFKSTEQKYLTLNTESTRIMTKLRAQQCRFWTSFFPKVLEMTGNIDEAEWEWKAGFHRWNNYMMDWKNQFNDYTSKKESCVGL

SEQ ID NO: 35 - DNA, 1722 bp, Artificial
  Synthetic butyrylcholinesterase variant
gaagatgacatcataattgcaacaaagaatggaaaagtcagagggatgaacttgacagtttttggtggcacggtaacagcctttcttggaattccctatgcacagccacctcttggtagacttcgattcaaaaagccacagtctctgaccaagtggtctgatatttggaatgccacaaaatatgcaaattcttgctgtcagaacatagatcaaagttttccaggcttccatggatcagagatgtggaacccaaacactgacctcagtgaagactgtttatatctaaatgtatggattccagcacctaaaccaaaaaatgccactgtattgatatggatttatggtggtggttttcaatggggaacatcatctttacatgtttatgatggcaagtttctggctcgggttgaaagagttattgtagtgtcaatgaactatagggtgggtgccctaggattcttagctttgccaggaaatcctgaggctccagggaacatgggtttatttgatcaacagttggctcttcagtgggttcaaaaaaatatagcagcctttggtggaaatcctaaaagtgtaactctctttggagaaagtgcaggagcagcttcagttagcctgcatttgctttctcctggaagccattcattgttcaccagagccattctgcaaagtggttccgckaatgctccttgggcggtaacatctctttatgaagctaggaacagaacgttgaacttagctaaattgactggttgctctagagagaatgagactgaaataatcaagtgtcttagaaataaagatccccaagaaattcttctgaatgaagcatttgttgtcccctatgggactcctttgtcagtaaactttggtccgaccgtggatggtgattttctcactgacatgccagacatattacttgaacttggacaatttaaaaaaacccagattttggtgggtgttaataaagatgaagggacagcttttttagtctatggtgctcctggcttcagcaaagataacaatagtatcataactagaaaagaatttcaggaaggtttaaaaatattttttccaggagtgagtgagtttggaaaggaatccatcctttttcattacacagactgggtagatgatcagagacctgaaaactaccgtgaggccttgggtgatgttgttggggattataatttcatatgccctgccttggagttcaccaagaagttctcagaatggggaaataatgcctttttctactattttgaacaccgatcctccaaacttccgtggccagaatggatgggagtgatgcatggctatgaaattgaatttgtctttggtttacctctggaaagaagagataattacacaaaagccgaggaaattttgagtagatccatagtgaaacggtgggcaaattttgcaaaatatgggaatccaaatgagactcagaacaatagcacaagctggcctgtcttcaaaagcactgaacaaaaatatctaaccttgaatacagagtcaacaagaataatgacgaaactacgtgctcaacaatgtcgattctggacatcattttttccaaaagtcttggaaatgacaggaaatattgatgaagcagaatgggagtggaaagcaggattccatcgctggaacaattacatgatggactggaaaaatcaatttaacgattacactagcaagaaagaaagttgtgtgggtctc

SEQ ID NO: 36 - protein, 574 aa, Artificial
  Synthetic butyrylcholinesterase variant
  VARIANT (120)..(120): T120W
  VARIANT (227)..(227): Xaa = Ala
EDDIIIATKNGKVRGMNLTVFGGTVTAFLGIPYAQPPLGRLRFKKPQSLTKWSDIWNATKYANSCCQNIDQSFPGFHGSEMWNPNTDLSEDCLYLNVWIPAPKPKNATVLIWIYGGGFQWGTSSLHVYDGKFLARVERVIVVSMNYRVGALGFLALPGNPEAPGNMGLFDQQLALQWVQKNIAAFGGNPKSVTLFGESAGAASVSLHLLSPGSHSLFTRAILQSGSXNAPWAVTSLYEARNRTLNLAKLTGCSRENETEIIKCLRNKDPQEILLNEAFVVPYGTPLSVNFGPTVDGDFLTDMPDILLELGQFKKTQILVGVNKDEGTAFLVYGAPGFSKDNNSIITRKEFQEGLKIFFPGVSEFGKESILFHYTDWVDDQRPENYREALGDVVGDYNFICPALEFTKKFSEWGNNAFFYYFEHRSSKLPWPEWMGVMHGYEIEFVFGLPLERRDNYTKAEEILSRSIVKRWANFAKYGNPNETQNNSTSWPVFKSTEQKYLTLNTESTRIMTKLRAQQCRFWTSFFPKVLEMTGNIDEAEWEWKAGFHRWNNYMMDWKNQFNDYTSKKESCVGL

SEQ ID NO: 37 - DNA, 1722 bp, Artificial
  Synthetic butyrylcholinesterase variant
gaagatgacatcataattgcaacaaagaatggaaaagtcagagggatgaacttgacagtttttggtggcacggtaacagcctttcttggaattccctatgcacagccacctcttggtagacttcgattcaaaaagccacagtctctgaccaagtggtctgatatttggaatgccacaaaatatgcaaattcttgctgtcagaacatagatcaaagttttccaggcttccatggatcagagatgtggaacccaaacactgacctcagtgaagactgtttatatctaaatgtatggattccagcacctaaaccaaaaaatgccactgtattgatatggatttatggtggtggttttcaatatggaacatcatctttacatgtttatgatggcaagtttctggctcgggttgaaagagttattgtagtgtcaatgaactatagggtgggtgccctaggattcttagctttgccaggaaatcctgaggctccagggaacatgggtttatttgatcaacagttggctcttcagtgggttcaaaaaaatatagcagcctttggtggaaatcctaaaagtgtaactctctttggagaaagtgcaggagcagcttcagttagcctgcatttgctttctcctggaagccattcattgttcaccagagccattctgcaaagtggttccgckaatgctccttgggcggtaacatctctttatgaagctaggaacagaacgttgaacttagctaaattgactggttgctctagagagaatgagactgaaataatcaagtgtcttagaaataaagatccccaagaaattcttctgaatgaagcatttgttgtcccctatgggactcctttgtcagtaaactttggtccgaccgtggatggtgattttctcactgacatgccagacatattacttgaacttggacaatttaaaaaaacccagattttggtgggtgttaataaagatgaagggacagcttttttagtctatggtgctcctggcttcagcaaagataacaatagtatcataactagaaaagaatttcaggaaggtttaaaaatattttttccaggagtgagtgagtttggaaaggaatccatcctttttcattacacagactgggtagatgatcagagacctgaaaactaccgtgaggccttgggtgatgttgttggggattataatttcatatgccctgccttggagttcaccaagaagttctcagaatggggaaataatgcctttttctactattttgaacaccgatcctccaaacttccgtggccagaatggatgggagtgatgcatggctatgaaattgaatttgtctttggtttacctctggaaagaagagataattacacaaaagccgaggaaattttgagtagatccatagtgaaacggtgggcaaattttgcaaaatatgggaatccaaatgagactcagaacaatagcacaagctggcctgtcttcaaaagcactgaacaaaaatatctaaccttgaatacagagtcaacaagaataatgacgaaactacgtgctcaacaatgtcgattctggacatcattttttccaaaagtcttggaaatgacaggaaatattgatgaagcagaatgggagtggaaagcaggattccatcgctggaacaattacatgatggactggaaaaatcaatttaacgattacactagcaagaaagaaagttgtgtgggtctc

SEQ ID NO: 38 - protein, 574 aa, Artificial
  Synthetic butyrylcholinesterase variant
  VARIANT (120)..(120): T120Y
  VARIANT (227)..(227): Xaa = Ala
EDDIIIATKNGKVRGMNLTVFGGTVTAFLGIPYAQPPLGRLRFKKPQSLTKWSDIWNATKYANSCCQNIDQSFPGFHGSEMWNPNTDLSEDCLYLNVWIPAPKPKNATVLIWIYGGGFQYGTSSLHVYDGKFLARVERVIVVSMNYRVGALGFLALPGNPEAPGNMGLFDQQLALQWVQKNIAAFGGNPKSVTLFGESAGAASVSLHLLSPGSHSLFTRAILQSGSXNAPWAVTSLYEARNRTLNLAKLTGCSRENETEIIKCLRNKDPQEILLNEAFVVPYGTPLSVNFGPTVDGDFLTDMPDILLELGQFKKTQILVGVNKDEGTAFLVYGAPGFSKDNNSIITRKEFQEGLKIFFPGVSEFGKESILFHYTDWVDDQRPENYREALGDVVGDYNFICPALEFTKKFSEWGNNAFFYYFEHRSSKLPWPEWMGVMHGYEIEFVFGLPLERRDNYTKAEEILSRSIVKRWANFAKYGNPNETQNNSTSWPVFKSTEQKYLTLNTESTRIMTKLRAQQCRFWTSFFPKVLEMTGNIDEAEWEWKAGFHRWNNYMMDWKNQFNDYTSKKESCVGL

SEQ ID NO: 39 - DNA, 1722 bp, Artificial
  Synthetic butyrylcholinesterase variant
gaagatgacatcataattgcaacaaagaatggaaaagtcagagggatgaacttgacagtttttggtggcacggtaacagcctttcttggaattccctatgcacagccacctcttggtagacttcgattcaaaaagccacagtctctgaccaagtggtctgatatttggaatgccacaaaatatgcaaattcttgctgtcagaacatagatcaaagttttccaggcttccatggatcagagatgtggaacccaaacactgacctcagtgaagactgtttatatctaaatgtatggattccagcacctaaaccaaaaaatgccactgtattgatatggatttatggtggtggttttcaaactggaacatcatctttacatgtttatgatggcaagtttctggctcgggttgaaagagttattgtagtgtcaatgaactatagggtgggtgccctaggattcttagctttgccaggaaatcctgaggctccagggaacatgggtttatttgatcaacagttggctcttcagtgggttcaaaaaaatatagcagcctttggtggaaatcctaaaagtgtaactctctttggagaaagtgcaggagcagcttcagttagcctgcatttgctttctcctggaagccattcattgttcaccagagccattctgcaaagtggttccgckaatgctccttgggcggtaacatctctttatgaagctaggaacagaacgttgaacttagctaaattgactggttgctctagagagaatgagactgaaataatcaagtgtcttagaaataaagatccccaagaaattcttctgaatgaagcatttgttgtccccggtgggactcctttgtcagtaaactttggtccgaccgtggatggtgattttctcactgacatgccagacatattacttgaacttggacaatttaaaaaaacccagattttggtgggtgttaataaagatgaagggacagcttttttagtctatggtgctcctggcttcagcaaagataacaatagtatcataactagaaaagaatttcaggaaggtttaaaaatattttttccaggagtgagtgagtttggaaaggaatccatcctttttcattacacagactgggtagatgatcagagacctgaaaactaccgtgaggccttgggtgatgttgttggggattataatttcatatgccctgccttggagttcaccaagaagttctcagaatggggaaataatgcctttttctactattttgaacaccgatcctccaaacttccgtggccagaatggatgggagtgatgcatggctatgaaattgaatttgtctttggtttacctctggaaagaagagataattacacaaaagccgaggaaattttgagtagatccatagtgaaacggtgggcaaattttgcaaaatatgggaatccaaatgagactcagaacaatagcacaagctggcctgtcttcaaaagcactgaacaaaaatatctaaccttgaatacagagtcaacaagaataatgacgaaactacgtgctcaacaatgtcgattctggacatcattttttccaaaagtcttggaaatgacaggaaatattgatgaagcagaatgggagtggaaagcaggattccatcgctggaacaattacatgatggactggaaaaatcaatttaacgattacactagcaagaaagaaagttgtgtgggtctc

SEQ ID NO: 40 - protein, 574 aa, Artificial
  Synthetic butyrylcholinesterase variant
  VARIANT (227)..(227): Xaa = Ala
  VARIANT (282)..(282): Y282G
EDDIIIATKNGKVRGMNLTVFGGTVTAFLGIPYAQPPLGRLRFKKPQSLTKWSDIWNATKYANSCCQNIDQSFPGFHGSEMWNPNTDLSEDCLYLNVWIPAPKPKNATVLIWIYGGGFQTGTSSLHVYDGKFLARVERVIVVSMNYRVGALGFLALPGNPEAPGNMGLFDQQLALQWVQKNIAAFGGNPKSVTLFGESAGAASVSLHLLSPGSHSLFTRAILQSGSXNAPWAVTSLYEARNRTLNLAKLTGCSRENETEIIKCLRNKDPQEILLNEAFVVPGGTPLSVNFGPTVDGDFLTDMPDILLELGQFKKTQILVGVNKDEGTAFLVYGAPGFSKDNNSIITRKEFQEGLKIFFPGVSEFGKESILFHYTDWVDDQRPENYREALGDVVGDYNFICPALEFTKKFSEWGNNAFFYYFEHRSSKLPWPEWMGVMHGYEIEFVFGLPLERRDNYTKAEEILSRSIVKRWANFAKYGNPNETQNNSTSWPVFKSTEQKYLTLNTESTRIMTKLRAQQCRFWTSFFPKVLEMTGNIDEAEWEWKAGFHRWNNYMMDWKNQFNDYTSKKESCVGL

SEQ ID NO: 41 - DNA, 1722 bp, Artificial
  Synthetic butyrylcholinesterase variant
gaagatgacatcataattgcaacaaagaatggaaaagtcagagggatgaacttgacagtttttggtggcacggtaacagcctttcttggaattccctatgcacagccacctcttggtagacttcgattcaaaaagccacagtctctgaccaagtggtctgatatttggaatgccacaaaatatgcaaattcttgctgtcagaacatagatcaaagttttccaggcttccatggatcagagatgtggaacccaaacactgacctcagtgaagactgtttatatctaaatgtatggattccagcacctaaaccaaaaaatgccactgtattgatatggatttatggtggtggttttcaaactggaacatcatctttacatgtttatgatggcaagtttctggctcgggttgaaagagttattgtagtgtcaatgaactatagggtgggtgccctaggattcttagctttgccaggaaatcctgaggctccagggaacatgggtttatttgatcaacagttggctcttcagtgggttcaaaaaaatatagcagcctttggtggaaatcctaaaagtgtaactctctttggagaaagtgcaggagcagcttcagttagcctgcatttgctttctcctggaagccattcattgttcaccagagccattctgcaaagtggttccgckaatgctccttgggcggtaacatctctttatgaagctaggaacagaacgttgaacttagctaaattgactggttgctctagagagaatgagactgaaataatcaagtgtcttagaaataaagatccccaagaaattcttctgaatgaagcatttgttgtccccaatgggactcctttgtcagtaaactttggtccgaccgtggatggtgattttctcactgacatgccagacatattacttgaacttggacaatttaaaaaaacccagattttggtgggtgttaataaagatgaagggacagcttttttagtctatggtgctcctggcttcagcaaagataacaatagtatcataactagaaaagaatttcaggaaggtttaaaaatattttttccaggagtgagtgagtttggaaaggaatccatcctttttcattacacagactgggtagatgatcagagacctgaaaactaccgtgaggccttgggtgatgttgttggggattataatttcatatgccctgccttggagttcaccaagaagttctcagaatggggaaataatgcctttttctactattttgaacaccgatcctccaaacttccgtggccagaatggatgggagtgatgcatggctatgaaattgaatttgtctttggtttacctctggaaagaagagataattacacaaaagccgaggaaattttgagtagatccatagtgaaacggtgggcaaattttgcaaaatatgggaatccaaatgagactcagaacaatagcacaagctggcctgtcttcaaaagcactgaacaaaaatatctaaccttgaatacagagtcaacaagaataatgacgaaactacgtgctcaacaatgtcgattctggacatcattttttccaaaagtcttggaaatgacaggaaatattgatgaagcagaatgggagtggaaagcaggattccatcgctggaacaattacatgatggactggaaaaatcaatttaacgattacactagcaagaaagaaagttgtgtgggtctc

SEQ ID NO: 42 - protein, 574 aa, Artificial
  Synthetic butyrylcholinesterase variant
  VARIANT (227)..(227): Xaa = Ala
  VARIANT (282)..(282): Y282N
EDDIIIATKNGKVRGMNLTVFGGTVTAFLGIPYAQPPLGRLRFKKPQSLTKWSDIWNATKYANSCCQNIDQSFPGFHGSEMWNPNTDLSEDCLYLNVWIPAPKPKNATVLIWIYGGGFQTGTSSLHVYDGKFLARVERVIVVSMNYRVGALGFLALPGNPEAPGNMGLFDQQLALQWVQKNIAAFGGNPKSVTLFGESAGAASVSLHLLSPGSHSLFTRAILQSGSXNAPWAVTSLYEARNRTLNLAKLTGCSRENETEIIKCLRNKDPQEILLNEAFVVPNGTPLSVNFGPTVDGDFLTDMPDILLELGQFKKTQILVGVNKDEGTAFLVYGAPGFSKDNNSIITRKEFQEGLKIFFPGVSEFGKESILFHYTDWVDDQRPENYREALGDVVGDYNFICPALEFTKKFSEWGNNAFFYYFEHRSSKLPWPEWMGVMHGYEIEFVFGLPLERRDNYTKAEEILSRSIVKRWANFAKYGNPNETQNNSTSWPVFKSTEQKYLTLNTESTRIMTKLRAQQCRFWTSFFPKVLEMTGNIDEAEWEWKAGFHRWNNYMMDWKNQFNDYTSKKESCVGL

SEQ ID NO: 43 - DNA, 1722 bp, Artificial
  Synthetic butyrylcholinesterase variant
gaagatgacatcataattgcaacaaagaatggaaaagtcagagggatgaacttgacagtttttggtggcacggtaacagcctttcttggaattccctatgcacagccacctcttggtagacttcgattcaaaaagccacagtctctgaccaagtggtctgatatttggaatgccacaaaatatgcaaattcttgctgtcagaacatagatcaaagttttccaggcttccatggatcagagatgtggaacccaaacactgacctcagtgaagactgtttatatctaaatgtatggattccagcacctaaaccaaaaaatgccactgtattgatatggatttatggtggtggttttcaaactggaacatcatctttacatgtttatgatggcaagtttctggctcgggttgaaagagttattgtagtgtcaatgaactatagggtgggtgccctaggattcttagctttgccaggaaatcctgaggctccagggaacatgggtttatttgatcaacagttggctcttcagtgggttcaaaaaaatatagcagcctttggtggaaatcctaaaagtgtaactctctttggagaaagtgcaggagcagcttcagttagcctgcatttgctttctcctggaagccattcattgttcaccagagccattctgcaaagtggttccgckaatgctccttgggcggtaacatctctttatgaagctaggaacagaacgttgaacttagctaaattgactggttgctctagagagaatgagactgaaataatcaagtgtcttagaaataaagatccccaagaaattcttctgaatgaagcatttgttgtcccctatgggaaccctttgtcagtaaactttggtccgaccgtggatggtgattttctcactgacatgccagacatattacttgaacttggacaatttaaaaaaacccagattttggtgggtgttaataaagatgaagggacagcttttttagtctatggtgctcctggcttcagcaaagataacaatagtatcataactagaaaagaatttcaggaaggtttaaaaatattttttccaggagtgagtgagtttggaaaggaatccatcctttttcattacacagactgggtagatgatcagagacctgaaaactaccgtgaggccttgggtgatgttgttggggattataatttcatatgccctgccttggagttcaccaagaagttctcagaatggggaaataatgcctttttctactattttgaacaccgatcctccaaacttccgtggccagaatggatgggagtgatgcatggctatgaaattgaatttgtctttggtttacctctggaaagaagagataattacacaaaagccgaggaaattttgagtagatccatagtgaaacggtgggcaaattttgcaaaatatgggaatccaaatgagactcagaacaatagcacaagctggcctgtcttcaaaagcactgaacaaaaatatctaaccttgaatacagagtcaacaagaataatgacgaaactacgtgctcaacaatgtcgattctggacatcattttttccaaaagtcttggaaatgacaggaaatattgatgaagcagaatgggagtggaaagcaggattccatcgctggaacaattacatgatggactggaaaaatcaatttaacgattacactagcaagaaagaaagttgtgtgggtctc

SEQ ID NO: 44 - protein, 574 aa, Artificial
  Synthetic butyrylcholinesterase variant
  VARIANT (227)..(227): Xaa = Ala
  VARIANT (284)..(284): T284N
EDDIIIATKNGKVRGMNLTVFGGTVTAFLGIPYAQPPLGRLRFKKPQSLTKWSDIWNATKYANSCCQNIDQSFPGFHGSEMWNPNTDLSEDCLYLNVWIPAPKPKNATVLIWIYGGGFQTGTSSLHVYDGKFLARVERVIVVSMNYRVGALGFLALPGNPEAPGNMGLFDQQLALQWVQKNIAAFGGNPKSVTLFGESAGAASVSLHLLSPGSHSLFTRAILQSGSXNAPWAVTSLYEARNRTLNLAKLTGCSRENETEIIKCLRNKDPQEILLNEAFVVPYGNPLSVNFGPTVDGDFLTDMPDILLELGQFKKTQILVGVNKDEGTAFLVYGAPGFSKDNNSIITRKEFQEGLKIFFPGVSEFGKESILFHYTDWVDDQRPENYREALGDVVGDYNFICPALEFTKKFSEWGNNAFFYYFEHRSSKLPWPEWMGVMHGYEIEFVFGLPLERRDNYTKAEEILSRSIVKRWANFAKYGNPNETQNNSTSWPVFKSTEQKYLTLNTESTRIMTKLRAQQCRFWTSFFPKVLEMTGNIDEAEWEWKAGFHRWNNYMMDWKNQFNDYTSKKESCVGL

SEQ ID NO: 45 - DNA, 1722 bp, Artificial
  Synthetic butyrylcholinesterase variant
gaagatgacatcataattgcaacaaagaatggaaaagtcagagggatgaacttgacagtttttggtggcacggtaacagcctttcttggaattccctatgcacagccacctcttggtagacttcgattcaaaaagccacagtctctgaccaagtggtctgatatttggaatgccacaaaatatgcaaattcttgctgtcagaacatagatcaaagttttccaggcttccatggatcagagatgtggaacccaaacactgacctcagtgaagactgtttatatctaaatgtatggattccagcacctaaaccaaaaaatgccactgtattgatatggatttatggtggtggttttcaaactggaacatcatctttacatgtttatgatggcaagtttctggctcgggttgaaagagttattgtagtgtcaatgaactatagggtgggtgccctaggattcttagctttgccaggaaatcctgaggctccagggaacatgggtttatttgatcaacagttggctcttcagtgggttcaaaaaaatatagcagcctttggtggaaatcctaaaagtgtaactctctttggagaaagtgcaggagcagcttcagttagcctgcatttgctttctcctggaagccattcattgttcaccagagccattctgcaaagtggttccgckaatgctccttgggcggtaacatctctttatgaagctaggaacagaacgttgaacttagctaaattgactggttgctctagagagaatgagactgaaataatcaagtgtcttagaaataaagatccccaagaaattcttctgaatgaagcatttgttgtcccctatgggactcctttgtcagtaaactttggtccgaccgtggatggtgattttctccctgacatgccagacatattacttgaacttggacaatttaaaaaaacccagattttggtgggtgttaataaagatgaagggacagcttttttagtctatggtgctcctggcttcagcaaagataacaatagtatcataactagaaaagaatttcaggaaggtttaaaaatattttttccaggagtgagtgagtttggaaaggaatccatcctttttcattacacagactgggtagatgatcagagacctgaaaactaccgtgaggccttgggtgatgttgttggggattataatttcatatgccctgccttggagttcaccaagaagttctcagaatggggaaataatgcctttttctactattttgaacaccgatcctccaaacttccgtggccagaatggatgggagtgatgcatggctatgaaattgaatttgtctttggtttacctctggaaagaagagataattacacaaaagccgaggaaattttgagtagatccatagtgaaacggtgggcaaattttgcaaaatatgggaatccaaatgagactcagaacaatagcacaagctggcctgtcttcaaaagcactgaacaaaaatatctaaccttgaatacagagtcaacaagaataatgacgaaactacgtgctcaacaatgtcgattctggacatcattttttccaaaagtcttggaaatgacaggaaatattgatgaagcagaatgggagtggaaagcaggattccatcgctggaacaattacatgatggactggaaaaatcaatttaacgattacactagcaagaaagaaagttgtgtgggtctc

SEQ ID NO: 46 - protein, 574 aa, Artificial
  Synthetic butyrylcholinesterase variant
  VARIANT (227)..(227): Xaa = Ala
  VARIANT (300)..(300): T300P
EDDIIIATKNGKVRGMNLTVFGGTVTAFLGIPYAQPPLGRLRFKKPQSLTKWSDIWNATKYANSCCQNIDQSFPGFHGSEMWNPNTDLSEDCLYLNVWIPAPKPKNATVLIWIYGGGFQTGTSSLHVYDGKFLARVERVIVVSMNYRVGALGFLALPGNPEAPGNMGLFDQQLALQWVQKNIAAFGGNPKSVTLFGESAGAASVSLHLLSPGSHSLFTRAILQSGSXNAPWAVTSLYEARNRTLNLAKLTGCSRENETEIIKCLRNKDPQEILLNEAFVVPYGTPLSVNFGPTVDGDFLPDMPDILLELGQFKKTQILVGVNKDEGTAFLVYGAPGFSKDNNSIITRKEFQEGLKIFFPGVSEFGKESILFHYTDWVDDQRPENYREALGDVVGDYNFICPALEFTKKFSEWGNNAFFYYFEHRSSKLPWPEWMGVMHGYEIEFVFGLPLERRDNYTKAEEILSRSIVKRWANFAKYGNPNETQNNSTSWPVFKSTEQKYLTLNTESTRIMTKLRAQQCRFWTSFFPKVLEMTGNIDEAEWEWKAGFHRWNNYMMDWKNQFNDYTSKKESCVGL

SEQ ID NO: 47 - DNA, 1722 bp, Artificial
  Synthetic butyrylcholinesterase variant
gaagatgacatcataattgcaacaaagaatggaaaagtcagagggatgaacttgacagtttttggtggcacggtaacagcctttcttggaattccctatgcacagccacctcttggtagacttcgattcaaaaagccacagtctctgaccaagtggtctgatatttggaatgccacaaaatatgcaaattcttgctgtcagaacatagatcaaagttttccaggcttccatggatcagagatgtggaacccaaacactgacctcagtgaagactgtttatatctaaatgtatggattccagcacctaaaccaaaaaatgccactgtattgatatggatttatggtggtggttttcaaactggaacatcatctttacatgtttatgatggcaagtttctggctcgggttgaaagagttattgtagtgtcaatgaactatagggtgggtgccctaggattcttagctttgccaggaaatcctgaggctccagggaacatgggtttatttgatcaacagttggctcttcagtgggttcaaaaaaatatagcagcctttggtggaaatcctaaaagtgtaactctctttggagaaagtgcaggagcagcttcagttagcctgcatttgctttctcctggaagccattcattgttcaccagagccattctgcaaagtggttccgckaatgctccttgggcggtaacatctctttatgaagctaggaacagaacgttgaacttagctaaattgactggttgctctagagagaatgagactgaaataatcaagtgtcttagaaataaagatccccaagaaattcttctgaatgaagcatttgttgtcccctatgggcgtcctttgtcagtaaactttggtccgaccgtggatggtgattttctcactgacatgccagacatattacttgaacttggacaatttaaaaaaacccagattttggtgggtgttaataaagatgaagggacagcttttttagtctatggtgctcctggcttcagcaaagataacaatagtatcataactagaaaagaatttcaggaaggtttaaaaatattttttccaggagtgagtgagtttggaaaggaatccatcctttttcattacacagactgggtagatgatcagagacctgaaaactaccgtgaggccttgggtgatgttgttggggattataatttcatatgccctgccttggagttcaccaagaagttctcagaatggggaaataatgcctttttctactattttgaacaccgatcctccaaacttccgtggccagaatggatgggagtgatgcatggctatgaaattgaatttgtctttggtttacctctggaaagaagagataattacacaaaagccgaggaaattttgagtagatccatagtgaaacggtgggcaaattttgcaaaatatgggaatccaaatgagactcagaacaatagcacaagctggcctgtcttcaaaagcactgaacaaaaatatctaaccttgaatacagagtcaacaagaataatgacgaaactacgtgctcaacaatgtcgattctggacatcattttttccaaaagtcttggaaatgacaggaaatattgatgaagcagaatgggagtggaaagcaggattccatcgctggaacaattacatgatggactggaaaaatcaatttaacgattacactagcaagaaagaaagttgtgtgggtctc

SEQ ID NO: 48 - protein, 574 aa, Artificial
  Synthetic butyrylcholinesterase variant
  VARIANT (227)..(227): Xaa = Ala
  VARIANT (284)..(284): T284R
EDDIIIATKNGKVRGMNLTVFGGTVTAFLGIPYAQPPLGRLRFKKPQSLTKWSDIWNATKYANSCCQNIDQSFPGFHGSEMWNPNTDLSEDCLYLNVWIPAPKPKNATVLIWIYGGGFQTGTSSLHVYDGKFLARVERVIVVSMNYRVGALGFLALPGNPEAPGNMGLFDQQLALQWVQKNIAAFGGNPKSVTLFGESAGAASVSLHLLSPGSHSLFTRAILQSGSXNAPWAVTSLYEARNRTLNLAKLTGCSRENETEIIKCLRNKDPQEILLNEAFVVPYGRPLSVNFGPTVDGDFLTDMPDILLELGQFKKTQILVGVNKDEGTAFLVYGAPGFSKDNNSIITRKEFQEGLKIFFPGVSEFGKESILFHYTDWVDDQRPENYREALGDVVGDYNFICPALEFTKKFSEWGNNAFFYYFEHRSSKLPWPEWMGVMHGYEIEFVFGLPLERRDNYTKAEEILSRSIVKRWANFAKYGNPNETQNNSTSWPVFKSTEQKYLTLNTESTRIMTKLRAQQCRFWTSFFPKVLEMTGNIDEAEWEWKAGFHRWNNYMMDWKNQFNDYTSKKESCVGL

SEQ ID NO: 49 - DNA, 1722 bp, Artificial
  Synthetic butyrylcholinesterase variant
gaagatgacatcataattgcaacaaagaatggaaaagtcagagggatgaacttgacagtttttggtggcacggtaacagcctttcttggaattccctatgcacagccacctcttggtagacttcgattcaaaaagccacagtctctgaccaagtggtctgatatttggaatgccacaaaatatgcaaattcttgctgtcagaacatagatcaaagttttccaggcttccatggatcagagatgtggaacccaaacactgacctcagtgaagactgtttatatctaaatgtatggattccagcacctaaaccaaaaaatgccactgtattgatatggatttatggtggtggttttcaaactggaacatcatctttacatgtttatgatggcaagtttctggctcgggttgaaagagttattgtagtgtcaatgaactatagggtgggtgccctaggattcttagctttgccaggaaatcctgaggctccagggaacatgggtttatttgatcaacagttggctcttcagtgggttcaaaaaaatatagcagcctttggtggaaatcctaaaagtgtaactctctttggagaaagtgcaggagcagcttcagttagcctgcatttgctttctcctggaagccattcattgttcaccagagccattctgcaaagtggttccgckaatgctccttgggcggtaacatctctttatgaagctaggaacagaacgttgaacttagctaaattgactggttgctctagagagaatgagactgaaataatcaagtgtcttagaaataaagatccccaagaaattcttctgaatgaagcatttgttgtcccctatgggtctcctttgtcagtaaactttggtccgaccgtggatggtgattttctctctgacatgccagacatattacttgaacttggacaatttaaaaaaacccagattttggtgggtgttaataaagatgaagggacagcttttttagtctatggtgctcctggcttcagcaaagataacaatagtatcataactagaaaagaatttcaggaaggtttaaaaatattttttccaggagtgagtgagtttggaaaggaatccatcctttttcattacacagactgggtagatgatcagagacctgaaaactaccgtgaggccttgggtgatgttgttggggattataatttcatatgccctgccttggagttcaccaagaagttctcagaatggggaaataatgcctttttctactattttgaacaccgatcctccaaacttccgtggccagaatggatgggagtgatgcatggctatgaaattgaatttgtctttggtttacctctggaaagaagagataattacacaaaagccgaggaaattttgagtagatccatagtgaaacggtgggcaaattttgcaaaatatgggaatccaaatgagactcagaacaatagcacaagctggcctgtcttcaaaagcactgaacaaaaatatctaaccttgaatacagagtcaacaagaataatgacgaaactacgtgctcaacaatgtcgattctggacatcattttttccaaaagtcttggaaatgacaggaaatattgatgaagcagaatgggagtggaaagcaggattccatcgctggaacaattacatgatggactggaaaaatcaatttaacgattacactagcaagaaagaaagttgtgtgggtctc

SEQ ID NO: 50 - protein, 574 aa, Artificial
  Synthetic butyrylcholinesterase variant
  VARIANT (227)..(227): Xaa = Ala
  VARIANT (284)..(284): T284S
EDDIIIATKNGKVRGMNLTVFGGTVTAFLGIPYAQPPLGRLRFKKPQSLTKWSDIWNATKYANSCCQNIDQSFPGFHGSEMWNPNTDLSEDCLYLNVWIPAPKPKNATVLIWIYGGGFQTGTSSLHVYDGKFLARVERVIVVSMNYRVGALGFLALPGNPEAPGNMGLFDQQLALQWVQKNIAAFGGNPKSVTLFGESAGAASVSLHLLSPGSHSLFTRAILQSGSXNAPWAVTSLYEARNRTLNLAKLTGCSRENETEIIKCLRNKDPQEILLNEAFVVPYGSPLSVNFGPTVDGDFLSDMPDILLELGQFKKTQILVGVNKDEGTAFLVYGAPGFSKDNNSIITRKEFQEGLKIFFPGVSEFGKESILFHYTDWVDDQRPENYREALGDVVGDYNFICPALEFTKKFSEWGNNAFFYYFEHRSSKLPWPEWMGVMHGYEIEFVFGLPLERRDNYTKAEEILSRSIVKRWANFAKYGNPNETQNNSTSWPVFKSTEQKYLTLNTESTRIMTKLRAQQCRFWTSFFPKVLEMTGNIDEAEWEWKAGFHRWNNYMMDWKNQFNDYTSKKESCVGL

SEQ ID NO: 51 - DNA, 1722 bp, Artificial
  Synthetic butyrylcholinesterase variant
gaagatgacatcataattgcaacaaagaatggaaaagtcagagggatgaacttgacagtttttggtggcacggtaacagcctttcttggaattccctatgcacagccacctcttggtagacttcgattcaaaaagccacagtctctgaccaagtggtctgatatttggaatgccacaaaatatgcaaattcttgctgtcagaacatagatcaaagttttccaggcttccatggatcagagatgtggaacccaaacactgacctcagtgaagactgtttatatctaaatgtatggattccagcacctaaaccaaaaaatgccactgtattgatatggatttatggtggtggttttcaaactggaacatcatctttacatgtttatgatggcaagtttctggctcgggttgaaagagttattgtagtgtcaatgaactatagggtgggtgccctaggattcttagctttgccaggaaatcctgaggctccagggaacatgggtttatttgatcaacagttggctcttcagtgggttcaaaaaaatatagcagcctttggtggaaatcctaaaagtgtaactctctttggagaaagtgcaggagcagcttcagttagcctgcatttgctttctcctggaagccattcattgttcaccagagccattctgcaaagtggttccgckaatgctccttgggcggtaacatctctttatgaagctaggaacagaacgttgaacttagctaaattgactggttgctctagagagaatgagactgaaataatcaagtgtcttagaaataaagatccccaagaaattcttctgaatgaagcatttgttgtcccctatgggtatcctttgtcagtaaactttggtccgaccgtggatggtgattttctcactgacatgccagacatattacttgaacttggacaatttaaaaaaacccagattttggtgggtgttaataaagatgaagggacagcttttttagtctatggtgctcctggcttcagcaaagataacaatagtatcataactagaaaagaatttcaggaaggtttaaaaatattttttccaggagtgagtgagtttggaaaggaatccatcctttttcattacacagactgggtagatgatcagagacctgaaaactaccgtgaggccttgggtgatgttgttggggattataatttcatatgccctgccttggagttcaccaagaagttctcagaatggggaaataatgcctttttctactattttgaacaccgatcctccaaacttccgtggccagaatggatgggagtgatgcatggctatgaaattgaatttgtctttggtttacctctggaaagaagagataattacacaaaagccgaggaaattttgagtagatccatagtgaaacggtgggcaaattttgcaaaatatgggaatccaaatgagactcagaacaatagcacaagctggcctgtcttcaaaagcactgaacaaaaatatctaaccttgaatacagagtcaacaagaataatgacgaaactacgtgctcaacaatgtcgattctggacatcattttttccaaaagtcttggaaatgacaggaaatattgatgaagcagaatgggagtggaaagcaggattccatcgctggaacaattacatgatggactggaaaaatcaatttaacgattacactagcaagaaagaaagttgtgtgggtctc

SEQ ID NO: 52 - protein, 574 aa, Artificial
  Synthetic butyrylcholinesterase variant
  VARIANT (227)..(227): Xaa = Ala
  VARIANT (284)..(284): T284Y
EDDIIIATKNGKVRGMNLTVFGGTVTAFLGIPYAQPPLGRLRFKKPQSLTKWSDIWNATKYANSCCQNIDQSFPGFHGSEMWNPNTDLSEDCLYLNVWIPAPKPKNATVLIWIYGGGFQTGTSSLHVYDGKFLARVERVIVVSMNYRVGALGFLALPGNPEAPGNMGLFDQQLALQWVQKNIAAFGGNPKSVTLFGESAGAASVSLHLLSPGSHSLFTRAILQSGSXNAPWAVTSLYEARNRTLNLAKLTGCSRENETEIIKCLRNKDPQEILLNEAFVVPYGYPLSVNFGPTVDGDFLTDMPDILLELGQFKKTQILVGVNKDEGTAFLVYGAPGFSKDNNSIITRKEFQEGLKIFFPGVSEFGKESILFHYTDWVDDQRPENYREALGDVVGDYNFICPALEFTKKFSEWGNNAFFYYFEHRSSKLPWPEWMGVMHGYEIEFVFGLPLERRDNYTKAEEILSRSIVKRWANFAKYGNPNETQNNSTSWPVFKSTEQKYLTLNTESTRIMTKLRAQQCRFWTSFFPKVLEMTGNIDEAEWEWKAGFHRWNNYMMDWKNQFNDYTSKKESCVGL

SEQ ID NO: 53 - DNA, 1722 bp, Artificial
  Synthetic butyrylcholinesterase variant
gaagatgacatcataattgcaacaaagaatggaaaagtcagagggatgaacttgacagtttttggtggcacggtaacagcctttcttggaattccctatgcacagccacctcttggtagacttcgattcaaaaagccacagtctctgaccaagtggtctgatatttggaatgccacaaaatatgcaaattcttgctgtcagaacatagatcaaagttttccaggcttccatggatcagagatgtggaacccaaacactgacctcagtgaagactgtttatatctaaatgtatggattccagcacctaaaccaaaaaatgccactgtattgatatggatttatggtggtggttttcaaactggaacatcatctttacatgtttatgatggcaagtttctggctcgggttgaaagagttattgtagtgtcaatgaactatagggtgggtgccctaggattcttagctttgccaggaaatcctgaggctccagggaacatgggtttatttgatcaacagttggctcttcagtgggttcaaaaaaatatagcagcctttggtggaaatcctaaaagtgtaactctctttggagaaagtgcaggagcagcttcagttagcctgcatttgctttctcctggaagccattcattgttcaccagagccattctgcaaagtggttccgckaatgctccttgggcggtaacatctctttatgaagctaggaacagaacgttgaacttagctaaattgactggttgctctagagagaatgagactgaaataatcaagtgtcttagaaataaagatccccaagaaattcttctgaatgaagcatttgttgtcccctatgggactaatttgtcagtaaactttggtccgaccgtggatggtgattttctcactgacatgccagacatattacttgaacttggacaatttaaaaaaacccagattttggtgggtgttaataaagatgaagggacagcttttttagtctatggtgctcctggcttcagcaaagataacaatagtatcataactagaaaagaatttcaggaaggtttaaaaatattttttccaggagtgagtgagtttggaaaggaatccatcctttttcattacacagactgggtagatgatcagagacctgaaaactaccgtgaggccttgggtgatgttgttggggattataatttcatatgccctgccttggagttcaccaagaagttctcagaatggggaaataatgcctttttctactattttgaacaccgatcctccaaacttccgtggccagaatggatgggagtgatgcatggctatgaaattgaatttgtctttggtttacctctggaaagaagagataattacacaaaagccgaggaaattttgagtagatccatagtgaaacggtgggcaaattttgcaaaatatgggaatccaaatgagactcagaacaatagcacaagctggcctgtcttcaaaagcactgaacaaaaatatctaaccttgaatacagagtcaacaagaataatgacgaaactacgtgctcaacaatgtcgattctggacatcattttttccaaaagtcttggaaatgacaggaaatattgatgaagcagaatgggagtggaaagcaggattccatcgctggaacaattacatgatggactggaaaaatcaatttaacgattacactagcaagaaagaaagttgtgtgggtctc

SEQ ID NO: 54 - protein, 574 aa, Artificial
  Synthetic butyrylcholinesterase variant
  VARIANT (227)..(227): Xaa = Ala
  VARIANT (285)..(285): P285N
EDDIIIATKNGKVRGMNLTVFGGTVTAFLGIPYAQPPLGRLRFKKPQSLTKWSDIWNATKYANSCCQNIDQSFPGFHGSEMWNPNTDLSEDCLYLNVWIPAPKPKNATVLIWIYGGGFQTGTSSLHVYDGKFLARVERVIVVSMNYRVGALGFLALPGNPEAPGNMGLFDQQLALQWVQKNIAAFGGNPKSVTLFGESAGAASVSLHLLSPGSHSLFTRAILQSGSXNAPWAVTSLYEARNRTLNLAKLTGCSRENETEIIKCLRNKDPQEILLNEAFVVPYGTNLSVNFGPTVDGDFLTDMPDILLELGQFKKTQILVGVNKDEGTAFLVYGAPGFSKDNNSIITRKEFQEGLKIFFPGVSEFGKESILFHYTDWVDDQRPENYREALGDVVGDYNFICPALEFTKKFSEWGNNAFFYYFEHRSSKLPWPEWMGVMHGYEIEFVFGLPLERRDNYTKAEEILSRSIVKRWANFAKYGNPNETQNNSTSWPVFKSTEQKYLTLNTESTRIMTKLRAQQCRFWTSFFPKVLEMTGNIDEAEWEWKAGFHRWNNYMMDWKNQFNDYTSKKESCVGL

SEQ ID NO: 55 - DNA, 1722 bp, Artificial
  Synthetic butyrylcholinesterase variant
gaagatgacatcataattgcaacaaagaatggaaaagtcagagggatgaacttgacagtttttggtggcacggtaacagcctttcttggaattccctatgcacagccacctcttggtagacttcgattcaaaaagccacagtctctgaccaagtggtctgatatttggaatgccacaaaatatgcaaattcttgctgtcagaacatagatcaaagttttccaggcttccatggatcagagatgtggaacccaaacactgacctcagtgaagactgtttatatctaaatgtatggattccagcacctaaaccaaaaaatgccactgtattgatatggatttatggtggtggttttcaaactggaacatcatctttacatgtttatgatggcaagtttctggctcgggttgaaagagttattgtagtgtcaatgaactatagggtgggtgccctaggattcttagctttgccaggaaatcctgaggctccagggaacatgggtttatttgatcaacagttggctcttcagtgggttcaaaaaaatatagcagcctttggtggaaatcctaaaagtgtaactctctttggagaaagtgcaggagcagcttcagttagcctgcatttgctttctcctggaagccattcattgttcaccagagccattctgcaaagtggttccgckaatgctccttgggcggtaacatctctttatgaagctaggaacagaacgttgaacttagctaaattgactggttgctctagagagaatgagactgaaataatcaagtgtcttagaaataaagatccccaagaaattcttctgaatgaagcatttgttgtcccctatgggactcagttgtcagtaaactttggtccgaccgtggatggtgattttctcactgacatgccagacatattacttgaacttggacaatttaaaaaaacccagattttggtgggtgttaataaagatgaagggacagcttttttagtctatggtgctcctggcttcagcaaagataacaatagtatcataactagaaaagaatttcaggaaggtttaaaaatattttttccaggagtgagtgagtttggaaaggaatccatcctttttcattacacagactgggtagatgatcagagacctgaaaactaccgtgaggccttgggtgatgttgttggggattataatttcatatgccctgccttggagttcaccaagaagttctcagaatggggaaataatgcctttttctactattttgaacaccgatcctccaaacttccgtggccagaatggatgggagtgatgcatggctatgaaattgaatttgtctttggtttacctctggaaagaagagataattacacaaaagccgaggaaattttgagtagatccatagtgaaacggtgggcaaattttgcaaaatatgggaatccaaatgagactcagaacaatagcacaagctggcctgtcttcaaaagcactgaacaaaaatatctaaccttgaatacagagtcaacaagaataatgacgaaactacgtgctcaacaatgtcgattctggacatcattttttccaaaagtcttggaaatgacaggaaatattgatgaagcagaatgggagtggaaagcaggattccatcgctggaacaattacatgatggactggaaaaatcaatttaacgattacactagcaagaaagaaagttgtgtgggtctc

SEQ ID NO: 56 - protein, 574 aa, Artificial
  Synthetic butyrylcholinesterase variant
  VARIANT (227)..(227): Xaa = Ala
  VARIANT (285)..(285): P285Q
EDDIIIATKNGKVRGMNLTVFGGTVTAFLGIPYAQPPLGRLRFKKPQSLTKWSDIWNATKYANSCCQNIDQSFPGFHGSEMWNPNTDLSEDCLYLNVWIPAPKPKNATVLIWIYGGGFQTGTSSLHVYDGKFLARVERVIVVSMNYRVGALGFLALPGNPEAPGNMGLFDQQLALQWVQKNIAAFGGNPKSVTLFGESAGAASVSLHLLSPGSHSLFTRAILQSGSXNAPWAVTSLYEARNRTLNLAKLTGCSRENETEIIKCLRNKDPQEILLNEAFVVPYGTQLSVNFGPTVDGDFLTDMPDILLELGQFKKTQILVGVNKDEGTAFLVYGAPGFSKDNNSIITRKEFQEGLKIFFPGVSEFGKESILFHYTDWVDDQRPENYREALGDVVGDYNFICPALEFTKKFSEWGNNAFFYYFEHRSSKLPWPEWMGVMHGYEIEFVFGLPLERRDNYTKAEEILSRSIVKRWANFAKYGNPNETQNNSTSWPVFKSTEQKYLTLNTESTRIMTKLRAQQCRFWTSFFPKVLEMTGNIDEAEWEWKAGFHRWNNYMMDWKNQFNDYTSKKESCVGL

SEQ ID NO: 57 - DNA, 1722 bp, Artificial
  Synthetic butyrylcholinesterase variant
gaagatgacatcataattgcaacaaagaatggaaaagtcagagggatgaacttgacagtttttggtggcacggtaacagcctttcttggaattccctatgcacagccacctcttggtagacttcgattcaaaaagccacagtctctgaccaagtggtctgatatttggaatgccacaaaatatgcaaattcttgctgtcagaacatagatcaaagttttccaggcttccatggatcagagatgtggaacccaaacactgacctcagtgaagactgtttatatctaaatgtatggattccagcacctaaaccaaaaaatgccactgtattgatatggatttatggtggtggttttcaaactggaacatcatctttacatgtttatgatggcaagtttctggctcgggttgaaagagttattgtagtgtcaatgaactatagggtgggtgccctaggattcttagctttgccaggaaatcctgaggctccagggaacatgggtttatttgatcaacagttggctcttcagtgggttcaaaaaaatatagcagcctttggtggaaatcctaaaagtgtaactctctttggagaaagtgcaggagcagcttcagttagcctgcatttgctttctcctggaagccattcattgttcaccagagccattctgcaaagtggttccgckaatgctccttgggcggtaacatctctttatgaagctaggaacagaacgttgaacttagctaaattgactggttgctctagagagaatgagactgaaataatcaagtgtcttagaaataaagatccccaagaaattcttctgaatgaagcatttgttgtcccctatgggactcctgcgtcagtaaactttggtccgaccgtggatggtgattttctcactgacatgccagacatattacttgaacttggacaatttaaaaaaacccagattttggtgggtgttaataaagatgaagggacagcttttttagtctatggtgctcctggcttcagcaaagataacaatagtatcataactagaaaagaatttcaggaaggtttaaaaatattttttccaggagtgagtgagtttggaaaggaatccatcctttttcattacacagactgggtagatgatcagagacctgaaaactaccgtgaggccttgggtgatgttgttggggattataatttcatatgccctgccttggagttcaccaagaagttctcagaatggggaaataatgcctttttctactattttgaacaccgatcctccaaacttccgtggccagaatggatgggagtgatgcatggctatgaaattgaatttgtctttggtttacctctggaaagaagagataattacacaaaagccgaggaaattttgagtagatccatagtgaaacggtgggcaaattttgcaaaatatgggaatccaaatgagactcagaacaatagcacaagctggcctgtcttcaaaagcactgaacaaaaatatctaaccttgaatacagagtcaacaagaataatgacgaaactacgtgctcaacaatgtcgattctggacatcattttttccaaaagtcttggaaatgacaggaaatattgatgaagcagaatgggagtggaaagcaggattccatcgctggaacaattacatgatggactggaaaaatcaatttaacgattacactagcaagaaagaaagttgtgtgggtctc

SEQ ID NO: 58 - protein, 574 aa, Artificial
  Synthetic butyrylcholinesterase variant
  VARIANT (227)..(227): Xaa = Ala
  VARIANT (286)..(286): L286A
EDDIIIATKNGKVRGMNLTVFGGTVTAFLGIPYAQPPLGRLRFKKPQSLTKWSDIWNATKYANSCCQNIDQSFPGFHGSEMWNPNTDLSEDCLYLNVWIPAPKPKNATVLIWIYGGGFQTGTSSLHVYDGKFLARVERVIVVSMNYRVGALGFLALPGNPEAPGNMGLFDQQLALQWVQKNIAAFGGNPKSVTLFGESAGAASVSLHLLSPGSHSLFTRAILQSGSXNAPWAVTSLYEARNRTLNLAKLTGCSRENETEIIKCLRNKDPQEILLNEAFVVPYGTPASVNFGPTVDGDFLTDMPDILLELGQFKKTQILVGVNKDEGTAFLVYGAPGFSKDNNSIITRKEFQEGLKIFFPGVSEFGKESILFHYTDWVDDQRPENYREALGDVVGDYNFICPALEFTKKFSEWGNNAFFYYFEHRSSKLPWPEWMGVMHGYEIEFVFGLPLERRDNYTKAEEILSRSIVKRWANFAKYGNPNETQNNSTSWPVFKSTEQKYLTLNTESTRIMTKLRAQQCRFWTSFFPKVLEMTGNIDEAEWEWKAGFHRWNNYMMDWKNQFNDYTSKKESCVGL

SEQ ID NO: 59 - DNA, 1722 bp, Artificial
  Synthetic butyrylcholinesterase variant
gaagatgacatcataattgcaacaaagaatggaaaagtcagagggatgaacttgacagtttttggtggcacggtaacagcctttcttggaattccctatgcacagccacctcttggtagacttcgattcaaaaagccacagtctctgaccaagtggtctgatatttggaatgccacaaaatatgcaaattcttgctgtcagaacatagatcaaagttttccaggcttccatggatcagagatgtggaacccaaacactgacctcagtgaagactgtttatatctaaatgtatggattccagcacctaaaccaaaaaatgccactgtattgatatggatttatggtggtggttttcaaactggaacatcatctttacatgtttatgatggcaagtttctggctcgggttgaaagagttattgtagtgtcaatgaactatagggtgggtgccctaggattcttagctttgccaggaaatcctgaggctccagggaacatgggtttatttgatcaacagttggctcttcagtgggttcaaaaaaatatagcagcctttggtggaaatcctaaaagtgtaactctctttggagaaagtgcaggagcagcttcagttagcctgcatttgctttctcctggaagccattcattgttcaccagagccattctgcaaagtggttccgckaatgctccttgggcggtaacatctctttatgaagctaggaacagaacgttgaacttagctaaattgactggttgctctagagagaatgagactgaaataatcaagtgtcttagaaataaagatccccaagaaattcttctgaatgaagcatttgttgtcccctatgggactcctgggtcagtaaactttggtccgaccgtggatggtgattttctcactgacatgccagacatattacttgaacttggacaatttaaaaaaacccagattttggtgggtgttaataaagatgaagggacagcttttttagtctatggtgctcctggcttcagcaaagataacaatagtatcataactagaaaagaatttcaggaaggtttaaaaatattttttccaggagtgagtgagtttggaaaggaatccatcctttttcattacacagactgggtagatgatcagagacctgaaaactaccgtgaggccttgggtgatgttgttggggattataatttcatatgccctgccttggagttcaccaagaagttctcagaatggggaaataatgcctttttctactattttgaacaccgatcctccaaacttccgtggccagaatggatgggagtgatgcatggctatgaaattgaatttgtctttggtttacctctggaaagaagagataattacacaaaagccgaggaaattttgagtagatccatagtgaaacggtgggcaaattttgcaaaatatgggaatccaaatgagactcagaacaatagcacaagctggcctgtcttcaaaagcactgaacaaaaatatctaaccttgaatacagagtcaacaagaataatgacgaaactacgtgctcaacaatgtcgattctggacatcattttttccaaaagtcttggaaatgacaggaaatattgatgaagcagaatgggagtggaaagcaggattccatcgctggaacaattacatgatggactggaaaaatcaatttaacgattacactagcaagaaagaaagttgtgtgggtctc

SEQ ID NO: 60 - protein, 574 aa, Artificial
  Synthetic butyrylcholinesterase variant
  VARIANT (227)..(227): Xaa = Ala
  VARIANT (286)..(286): L286G
EDDIIIATKNGKVRGMNLTVFGGTVTAFLGIPYAQPPLGRLRFKKPQSLTKWSDIWNATKYANSCCQNIDQSFPGFHGSEMWNPNTDLSEDCLYLNVWIPAPKPKNATVLIWIYGGGFQTGTSSLHVYDGKFLARVERVIVVSMNYRVGALGFLALPGNPEAPGNMGLFDQQLALQWVQKNIAAFGGNPKSVTLFGESAGAASVSLHLLSPGSHSLFTRAILQSGSXNAPWAVTSLYEARNRTLNLAKLTGCSRENETEIIKCLRNKDPQEILLNEAFVVPYGTPGSVNFGPTVDGDFLTDMPDILLELGQFKKTQILVGVNKDEGTAFLVYGAPGFSKDNNSIITRKEFQEGLKIFFPGVSEFGKESILFHYTDWVDDQRPENYREALGDVVGDYNFICPALEFTKKFSEWGNNAFFYYFEHRSSKLPWPEWMGVMHGYEIEFVFGLPLERRDNYTKAEEILSRSIVKRWANFAKYGNPNETQNNSTSWPVFKSTEQKYLTLNTESTRIMTKLRAQQCRFWTSFFPKVLEMTGNIDEAEWEWKAGFHRWNNYMMDWKNQFNDYTSKKESCVGL

SEQ ID NO: 61 - DNA, 1722 bp, Artificial
  Synthetic butyrylcholinesterase variant
gaagatgacatcataattgcaacaaagaatggaaaagtcagagggatgaacttgacagtttttggtggcacggtaacagcctttcttggaattccctatgcacagccacctcttggtagacttcgattcaaaaagccacagtctctgaccaagtggtctgatatttggaatgccacaaaatatgcaaattcttgctgtcagaacatagatcaaagttttccaggcttccatggatcagagatgtggaacccaaacactgacctcagtgaagactgtttatatctaaatgtatggattccagcacctaaaccaaaaaatgccactgtattgatatggatttatggtggtggttttcaaactggaacatcatctttacatgtttatgatggcaagtttctggctcgggttgaaagagttattgtagtgtcaatgaactatagggtgggtgccctaggattcttagctttgccaggaaatcctgaggctccagggaacatgggtttatttgatcaacagttggctcttcagtgggttcaaaaaaatatagcagcctttggtggaaatcctaaaagtgtaactctctttggagaaagtgcaggagcagcttcagttagcctgcatttgctttctcctggaagccattcattgttcaccagagccattctgcaaagtggttccgckaatgctccttgggcggtaacatctctttatgaagctaggaacagaacgttgaacttagctaaattgactggttgctctagagagaatgagactgaaataatcaagtgtcttagaaataaagatccccaagaaattcttctgaatgaagcatttgttgtcccctatgggactcctaagtcagtaaactttggtccgaccgtggatggtgattttctcactgacatgccagacatattacttgaacttggacaatttaaaaaaacccagattttggtgggtgttaataaagatgaagggacagcttttttagtctatggtgctcctggcttcagcaaagataacaatagtatcataactagaaaagaatttcaggaaggtttaaaaatattttttccaggagtgagtgagtttggaaaggaatccatcctttttcattacacagactgggtagatgatcagagacctgaaaactaccgtgaggccttgggtgatgttgttggggattataatttcatatgccctgccttggagttcaccaagaagttctcagaatggggaaataatgcctttttctactattttgaacaccgatcctccaaacttccgtggccagaatggatgggagtgatgcatggctatgaaattgaatttgtctttggtttacctctggaaagaagagataattacacaaaagccgaggaaattttgagtagatccatagtgaaacggtgggcaaattttgcaaaatatgggaatccaaatgagactcagaacaatagcacaagctggcctgtcttcaaaagcactgaacaaaaatatctaaccttgaatacagagtcaacaagaataatgacgaaactacgtgctcaacaatgtcgattctggacatcattttttccaaaagtcttggaaatgacaggaaatattgatgaagcagaatgggagtggaaagcaggattccatcgctggaacaattacatgatggactggaaaaatcaatttaacgattacactagcaagaaagaaagttgtgtgggtctc

SEQ ID NO: 62 - protein, 574 aa, Artificial
  Synthetic butyrylcholinesterase variant
  VARIANT (227)..(227): Xaa = Ala
  VARIANT (286)..(286): L286K
EDDIIIATKNGKVRGMNLTVFGGTVTAFLGIPYAQPPLGRLRFKKPQSLTKWSDIWNATKYANSCCQNIDQSFPGFHGSEMWNPNTDLSEDCLYLNVWIPAPKPKNATVLIWIYGGGFQTGTSSLHVYDGKFLARVERVIVVSMNYRVGALGFLALPGNPEAPGNMGLFDQQLALQWVQKNIAAFGGNPKSVTLFGESAGAASVSLHLLSPGSHSLFTRAILQSGSXNAPWAVTSLYEARNRTLNLAKLTGCSRENETEIIKCLRNKDPQEILLNEAFVVPYGTPKSVNFGPTVDGDFLTDMPDILLELGQFKKTQILVGVNKDEGTAFLVYGAPGFSKDNNSIITRKEFQEGLKIFFPGVSEFGKESILFHYTDWVDDQRPENYREALGDVVGDYNFICPALEFTKKFSEWGNNAFFYYFEHRSSKLPWPEWMGVMHGYEIEFVFGLPLERRDNYTKAEEILSRSIVKRWANFAKYGNPNETQNNSTSWPVFKSTEQKYLTLNTESTRIMTKLRAQQCRFWTSFFPKVLEMTGNIDEAEWEWKAGFHRWNNYMMDWKNQFNDYTSKKESCVGL

SEQ ID NO: 63 - DNA, 1722 bp, Artificial
  Synthetic butyrylcholinesterase variant
gaagatgacatcataattgcaacaaagaatggaaaagtcagagggatgaacttgacagtttttggtggcacggtaacagcctttcttggaattccctatgcacagccacctcttggtagacttcgattcaaaaagccacagtctctgaccaagtggtctgatatttggaatgccacaaaatatgcaaattcttgctgtcagaacatagatcaaagttttccaggcttccatggatcagagatgtggaacccaaacactgacctcagtgaagactgtttatatctaaatgtatggattccagcacctaaaccaaaaaatgccactgtattgatatggatttatggtggtggttttcaaactggaacatcatctttacatgtttatgatggcaagtttctggctcgggttgaaagagttattgtagtgtcaatgaactatagggtgggtgccctaggattcttagctttgccaggaaatcctgaggctccagggaacatgggtttatttgatcaacagttggctcttcagtgggttcaaaaaaatatagcagcctttggtggaaatcctaaaagtgtaactctctttggagaaagtgcaggagcagcttcagttagcctgcatttgctttctcctggaagccattcattgttcaccagagccattctgcaaagtggttccgckaatgctccttgggcggtaacatctctttatgaagctaggaacagaacgttgaacttagctaaattgactggttgctctagagagaatgagactgaaataatcaagtgtcttagaaataaagatccccaagaaattcttctgaatgaagcatttgttgtcccctatgggactcctatgtcagtaaactttggtccgaccgtggatggtgattttctcactgacatgccagacatattacttgaacttggacaatttaaaaaaacccagattttggtgggtgttaataaagatgaagggacagcttttttagtctatggtgctcctggcttcagcaaagataacaatagtatcataactagaaaagaatttcaggaaggtttaaaaatattttttccaggagtgagtgagtttggaaaggaatccatcctttttcattacacagactgggtagatgatcagagacctgaaaactaccgtgaggccttgggtgatgttgttggggattataatttcatatgccctgccttggagttcaccaagaagttctcagaatggggaaataatgcctttttctactattttgaacaccgatcctccaaacttccgtggccagaatggatgggagtgatgcatggctatgaaattgaatttgtctttggtttacctctggaaagaagagataattacacaaaagccgaggaaattttgagtagatccatagtgaaacggtgggcaaattttgcaaaatatgggaatccaaatgagactcagaacaatagcacaagctggcctgtcttcaaaagcactgaacaaaaatatctaaccttgaatacagagtcaacaagaataatgacgaaactacgtgctcaacaatgtcgattctggacatcattttttccaaaagtcttggaaatgacaggaaatattgatgaagcagaatgggagtggaaagcaggattccatcgctggaacaattacatgatggactggaaaaatcaatttaacgattacactagcaagaaagaaagttgtgtgggtctc

SEQ ID NO: 64 - protein, 574 aa, Artificial
  Synthetic butyrylcholinesterase variant
  VARIANT (227)..(227): Xaa = Ala
  VARIANT (286)..(286): L286M
EDDIIIATKNGKVRGMNLTVFGGTVTAFLGIPYAQPPLGRLRFKKPQSLTKWSDIWNATKYANSCCQNIDQSFPGFHGSEMWNPNTDLSEDCLYLNVWIPAPKPKNATVLIWIYGGGFQTGTSSLHVYDGKFLARVERVIVVSMNYRVGALGFLALPGNPEAPGNMGLFDQQLALQWVQKNIAAFGGNPKSVTLFGESAGAASVSLHLLSPGSHSLFTRAILQSGSXNAPWAVTSLYEARNRTLNLAKLTGCSRENETEIIKCLRNKDPQEILLNEAFVVPYGTPMSVNFGPTVDGDFLTDMPDILLELGQFKKTQILVGVNKDEGTAFLVYGAPGFSKDNNSIITRKEFQEGLKIFFPGVSEFGKESILFHYTDWVDDQRPENYREALGDVVGDYNFICPALEFTKKFSEWGNNAFFYYFEHRSSKLPWPEWMGVMHGYEIEFVFGLPLERRDNYTKAEEILSRSIVKRWANFAKYGNPNETQNNSTSWPVFKSTEQKYLTLNTESTRIMTKLRAQQCRFWTSFFPKVLEMTGNIDEAEWEWKAGFHRWNNYMMDWKNQFNDYTSKKESCVGL

SEQ ID NO: 65 - DNA, 1722 bp, Artificial
  Synthetic butyrylcholinesterase variant
gaagatgacatcataattgcaacaaagaatggaaaagtcagagggatgaacttgacagtttttggtggcacggtaacagcctttcttggaattccctatgcacagccacctcttggtagacttcgattcaaaaagccacagtctctgaccaagtggtctgatatttggaatgccacaaaatatgcaaattcttgctgtcagaacatagatcaaagttttccaggcttccatggatcagagatgtggaacccaaacactgacctcagtgaagactgtttatatctaaatgtatggattccagcacctaaaccaaaaaatgccactgtattgatatggatttatggtggtggttttcaaactggaacatcatctttacatgtttatgatggcaagtttctggctcgggttgaaagagttattgtagtgtcaatgaactatagggtgggtgccctaggattcttagctttgccaggaaatcctgaggctccagggaacatgggtttatttgatcaacagttggctcttcagtgggttcaaaaaaatatagcagcctttggtggaaatcctaaaagtgtaactctctttggagaaagtgcaggagcagcttcagttagcctgcatttgctttctcctggaagccattcattgttcaccagagccattctgcaaagtggttccgckaatgctccttgggcggtaacatctctttatgaagctaggaacagaacgttgaacttagctaaattgactggttgctctagagagaatgagactgaaataatcaagtgtcttagaaataaagatccccaagaaattcttctgaatgaagcatttgttgtcccctatgggactcctaattcagtaaactttggtccgaccgtggatggtgattttctcactgacatgccagacatattacttgaacttggacaatttaaaaaaacccagattttggtgggtgttaataaagatgaagggacagcttttttagtctatggtgctcctggcttcagcaaagataacaatagtatcataactagaaaagaatttcaggaaggtttaaaaatattttttccaggagtgagtgagtttggaaaggaatccatcctttttcattacacagactgggtagatgatcagagacctgaaaactaccgtgaggccttgggtgatgttgttggggattataatttcatatgccctgccttggagttcaccaagaagttctcagaatggggaaataatgcctttttctactattttgaacaccgatcctccaaacttccgtggccagaatggatgggagtgatgcatggctatgaaattgaatttgtctttggtttacctctggaaagaagagataattacacaaaagccgaggaaattttgagtagatccatagtgaaacggtgggcaaattttgcaaaatatgggaatccaaatgagactcagaacaatagcacaagctggcctgtcttcaaaagcactgaacaaaaatatctaaccttgaatacagagtcaacaagaataatgacgaaactacgtgctcaacaatgtcgattctggacatcattttttccaaaagtcttggaaatgacaggaaatattgatgaagcagaatgggagtggaaagcaggattccatcgctggaacaattacatgatggactggaaaaatcaatttaacgattacactagcaagaaagaaagttgtgtgggtctc

SEQ ID NO: 66 - protein, 574 aa, Artificial
  Synthetic butyrylcholinesterase variant
  VARIANT (227)..(227): Xaa = Ala
  VARIANT (286)..(286): L286N
EDDIIIATKNGKVRGMNLTVFGGTVTAFLGIPYAQPPLGRLRFKKPQSLTKWSDIWNATKYANSCCQNIDQSFPGFHGSEMWNPNTDLSEDCLYLNVWIPAPKPKNATVLIWIYGGGFQTGTSSLHVYDGKFLARVERVIVVSMNYRVGALGFLALPGNPEAPGNMGLFDQQLALQWVQKNIAAFGGNPKSVTLFGESAGAASVSLHLLSPGSHSLFTRAILQSGSXNAPWAVTSLYEARNRTLNLAKLTGCSRENETEIIKCLRNKDPQEILLNEAFVVPYGTPNSVNFGPTVDGDFLTDMPDILLELGQFKKTQILVGVNKDEGTAFLVYGAPGFSKDNNSIITRKEFQEGLKIFFPGVSEFGKESILFHYTDWVDDQRPENYREALGDVVGDYNFICPALEFTKKFSEWGNNAFFYYFEHRSSKLPWPEWMGVMHGYEIEFVFGLPLERRDNYTKAEEILSRSIVKRWANFAKYGNPNETQNNSTSWPVFKSTEQKYLTLNTESTRIMTKLRAQQCRFWTSFFPKVLEMTGNIDEAEWEWKAGFHRWNNYMMDWKNQFNDYTSKKESCVGL

SEQ ID NO: 67 - DNA, 1722 bp, Artificial
  Synthetic butyrylcholinesterase variant
gaagatgacatcataattgcaacaaagaatggaaaagtcagagggatgaacttgacagtttttggtggcacggtaacagcctttcttggaattccctatgcacagccacctcttggtagacttcgattcaaaaagccacagtctctgaccaagtggtctgatatttggaatgccacaaaatatgcaaattcttgctgtcagaacatagatcaaagttttccaggcttccatggatcagagatgtggaacccaaacactgacctcagtgaagactgtttatatctaaatgtatggattccagcacctaaaccaaaaaatgccactgtattgatatggatttatggtggtggttttcaaactggaacatcatctttacatgtttatgatggcaagtttctggctcgggttgaaagagttattgtagtgtcaatgaactatagggtgggtgccctaggattcttagctttgccaggaaatcctgaggctccagggaacatgggtttatttgatcaacagttggctcttcagtgggttcaaaaaaatatagcagcctttggtggaaatcctaaaagtgtaactctctttggagaaagtgcaggagcagcttcagttagcctgcatttgctttctcctggaagccattcattgttcaccagagccattctgcaaagtggttccgckaatgctccttgggcggtaacatctctttatgaagctaggaacagaacgttgaacttagctaaattgactggttgctctagagagaatgagactgaaataatcaagtgtcttagaaataaagatccccaagaaattcttctgaatgaagcatttgttgtcccctatgggactcctcgttcagtaaactttggtccgaccgtggatggtgattttctcactgacatgccagacatattacttgaacttggacaatttaaaaaaacccagattttggtgggtgttaataaagatgaagggacagcttttttagtctatggtgctcctggcttcagcaaagataacaatagtatcataactagaaaagaatttcaggaaggtttaaaaatattttttccaggagtgagtgagtttggaaaggaatccatcctttttcattacacagactgggtagatgatcagagacctgaaaactaccgtgaggccttgggtgatgttgttggggattataatttcatatgccctgccttggagttcaccaagaagttctcagaatggggaaataatgcctttttctactattttgaacaccgatcctccaaacttccgtggccagaatggatgggagtgatgcatggctatgaaattgaatttgtctttggtttacctctggaaagaagagataattacacaaaagccgaggaaattttgagtagatccatagtgaaacggtgggcaaattttgcaaaatatgggaatccaaatgagactcagaacaatagcacaagctggcctgtcttcaaaagcactgaacaaaaatatctaaccttgaatacagagtcaacaagaataatgacgaaactacgtgctcaacaatgtcgattctggacatcattttttccaaaagtcttggaaatgacaggaaatattgatgaagcagaatgggagtggaaagcaggattccatcgctggaacaattacatgatggactggaaaaatcaatttaacgattacactagcaagaaagaaagttgtgtgggtctc

SEQ ID NO: 68 - protein, 574 aa, Artificial
  Synthetic butyrylcholinesterase variant
  VARIANT (227)..(227): Xaa = Ala
  VARIANT (286)..(286): L286R
EDDIIIATKNGKVRGMNLTVFGGTVTAFLGIPYAQPPLGRLRFKKPQSLTKWSDIWNATKYANSCCQNIDQSFPGFHGSEMWNPNTDLSEDCLYLNVWIPAPKPKNATVLIWIYGGGFQTGTSSLHVYDGKFLARVERVIVVSMNYRVGALGFLALPGNPEAPGNMGLFDQQLALQWVQKNIAAFGGNPKSVTLFGESAGAASVSLHLLSPGSHSLFTRAILQSGSXNAPWAVTSLYEARNRTLNLAKLTGCSRENETEIIKCLRNKDPQEILLNEAFVVPYGTPRSVNFGPTVDGDFLTDMPDILLELGQFKKTQILVGVNKDEGTAFLVYGAPGFSKDNNSIITRKEFQEGLKIFFPGVSEFGKESILFHYTDWVDDQRPENYREALGDVVGDYNFICPALEFTKKFSEWGNNAFFYYFEHRSSKLPWPEWMGVMHGYEIEFVFGLPLERRDNYTKAEEILSRSIVKRWANFAKYGNPNETQNNSTSWPVFKSTEQKYLTLNTESTRIMTKLRAQQCRFWTSFFPKVLEMTGNIDEAEWEWKAGFHRWNNYMMDWKNQFNDYTSKKESCVGL

SEQ ID NO: 69 - DNA, 1722 bp, Artificial
  Synthetic butyrylcholinesterase variant
gaagatgacatcataattgcaacaaagaatggaaaagtcagagggatgaacttgacagtttttggtggcacggtaacagcctttcttggaattccctatgcacagccacctcttggtagacttcgattcaaaaagccacagtctctgaccaagtggtctgatatttggaatgccacaaaatatgcaaattcttgctgtcagaacatagatcaaagttttccaggcttccatggatcagagatgtggaacccaaacactgacctcagtgaagactgtttatatctaaatgtatggattccagcacctaaaccaaaaaatgccactgtattgatatggatttatggtggtggttttcaaactggaacatcatctttacatgtttatgatggcaagtttctggctcgggttgaaagagttattgtagtgtcaatgaactatagggtgggtgccctaggattcttagctttgccaggaaatcctgaggctccagggaacatgggtttatttgatcaacagttggctcttcagtgggttcaaaaaaatatagcagcctttggtggaaatcctaaaagtgtaactctctttggagaaagtgcaggagcagcttcagttagcctgcatttgctttctcctggaagccattcattgttcaccagagccattctgcaaagtggttccgckaatgctccttgggcggtaacatctctttatgaagctaggaacagaacgttgaacttagctaaattgactggttgctctagagagaatgagactgaaataatcaagtgtcttagaaataaagatccccaagaaattcttctgaatgaagcatttgttgtcccctatgggactcctttgtttgtaaactttggtccgaccgtggatggtgattttctcactgacatgccagacatattacttgaacttggacaatttaaaaaaacccagattttggtgggtgttaataaagatgaagggacagcttttttagtctatggtgctcctggcttcagcaaagataacaatagtatcataactagaaaagaatttcaggaaggtttaaaaatattttttccaggagtgagtgagtttggaaaggaatccatcctttttcattacacagactgggtagatgatcagagacctgaaaactaccgtgaggccttgggtgatgttgttggggattataatttcatatgccctgccttggagttcaccaagaagttctcagaatggggaaataatgcctttttctactattttgaacaccgatcctccaaacttccgtggccagaatggatgggagtgatgcatggctatgaaattgaatttgtctttggtttacctctggaaagaagagataattacacaaaagccgaggaaattttgagtagatccatagtgaaacggtgggcaaattttgcaaaatatgggaatccaaatgagactcagaacaatagcacaagctggcctgtcttcaaaagcactgaacaaaaatatctaaccttgaatacagagtcaacaagaataatgacgaaactacgtgctcaacaatgtcgattctggacatcattttttccaaaagtcttggaaatgacaggaaatattgatgaagcagaatgggagtggaaagcaggattccatcgctggaacaattacatgatggactggaaaaatcaatttaacgattacactagcaagaaagaaagttgtgtgggtctc

SEQ ID NO: 70 - protein, 574 aa, Artificial
  Synthetic butyrylcholinesterase variant
  VARIANT (227)..(227): Xaa = Ala
  VARIANT (287)..(287): S287F
EDDIIIATKNGKVRGMNLTVFGGTVTAFLGIPYAQPPLGRLRFKKPQSLTKWSDIWNATKYANSCCQNIDQSFPGFHGSEMWNPNTDLSEDCLYLNVWIPAPKPKNATVLIWIYGGGFQTGTSSLHVYDGKFLARVERVIVVSMNYRVGALGFLALPGNPEAPGNMGLFDQQLALQWVQKNIAAFGGNPKSVTLFGESAGAASVSLHLLSPGSHSLFTRAILQSGSXNAPWAVTSLYEARNRTLNLAKLTGCSRENETEIIKCLRNKDPQEILLNEAFVVPYGTPLFVNFGPTVDGDFLTDMPDILLELGQFKKTQILVGVNKDEGTAFLVYGAPGFSKDNNSIITRKEFQEGLKIFFPGVSEFGKESILFHYTDWVDDQRPENYREALGDVVGDYNFICPALEFTKKFSEWGNNAFFYYFEHRSSKLPWPEWMGVMHGYEIEFVFGLPLERRDNYTKAEEILSRSIVKRWANFAKYGNPNETQNNSTSWPVFKSTEQKYLTLNTESTRIMTKLRAQQCRFWTSFFPKVLEMTGNIDEAEWEWKAGFHRWNNYMMDWKNQFNDYTSKKESCVGL

SEQ ID NO: 71 - DNA, 1722 bp, Artificial
  Synthetic butyrylcholinesterase variant
gaagatgacatcataattgcaacaaagaatggaaaagtcagagggatgaacttgacagtttttggtggcacggtaacagcctttcttggaattccctatgcacagccacctcttggtagacttcgattcaaaaagccacagtctctgaccaagtggtctgatatttggaatgccacaaaatatgcaaattcttgctgtcagaacatagatcaaagttttccaggcttccatggatcagagatgtggaacccaaacactgacctcagtgaagactgtttatatctaaatgtatggattccagcacctaaaccaaaaaatgccactgtattgatatggatttatggtggtggttttcaaactggaacatcatctttacatgtttatgatggcaagtttctggctcgggttgaaagagttattgtagtgtcaatgaactatagggtgggtgccctaggattcttagctttgccaggaaatcctgaggctccagggaacatgggtttatttgatcaacagttggctcttcagtgggttcaaaaaaatatagcagcctttggtggaaatcctaaaagtgtaactctctttggagaaagtgcaggagcagcttcagttagcctgcatttgctttctcctggaagccattcattgttcaccagagccattctgcaaagtggttccgckaatgctccttgggcggtaacatctctttatgaagctaggaacagaacgttgaacttagctaaattgactggttgctctagagagaatgagactgaaataatcaagtgtcttagaaataaagatccccaagaaattcttctgaatgaagcatttgttgtcccctatgggactcctttgcatgtaaactttggtccgaccgtggatggtgattttctcactgacatgccagacatattacttgaacttggacaatttaaaaaaacccagattttggtgggtgttaataaagatgaagggacagcttttttagtctatggtgctcctggcttcagcaaagataacaatagtatcataactagaaaagaatttcaggaaggtttaaaaatattttttccaggagtgagtgagtttggaaaggaatccatcctttttcattacacagactgggtagatgatcagagacctgaaaactaccgtgaggccttgggtgatgttgttggggattataatttcatatgccctgccttggagttcaccaagaagttctcagaatggggaaataatgcctttttctactattttgaacaccgatcctccaaacttccgtggccagaatggatgggagtgatgcatggctatgaaattgaatttgtctttggtttacctctggaaagaagagataattacacaaaagccgaggaaattttgagtagatccatagtgaaacggtgggcaaattttgcaaaatatgggaatccaaatgagactcagaacaatagcacaagctggcctgtcttcaaaagcactgaacaaaaatatctaaccttgaatacagagtcaacaagaataatgacgaaactacgtgctcaacaatgtcgattctggacatcattttttccaaaagtcttggaaatgacaggaaatattgatgaagcagaatgggagtggaaagcaggattccatcgctggaacaattacatgatggactggaaaaatcaatttaacgattacactagcaagaaagaaagttgtgtgggtctc

SEQ ID NO: 72 - protein, 574 aa, Artificial
  Synthetic butyrylcholinesterase variant
  VARIANT (227)..(227): Xaa = Ala
  VARIANT (287)..(287): S287H
EDDIIIATKNGKVRGMNLTVFGGTVTAFLGIPYAQPPLGRLRFKKPQSLTKWSDIWNATKYANSCCQNIDQSFPGFHGSEMWNPNTDLSEDCLYLNVWIPAPKPKNATVLIWIYGGGFQTGTSSLHVYDGKFLARVERVIVVSMNYRVGALGFLALPGNPEAPGNMGLFDQQLALQWVQKNIAAFGGNPKSVTLFGESAGAASVSLHLLSPGSHSLFTRAILQSGSXNAPWAVTSLYEARNRTLNLAKLTGCSRENETEIIKCLRNKDPQEILLNEAFVVPYGTPLHVNFGPTVDGDFLTDMPDILLELGQFKKTQILVGVNKDEGTAFLVYGAPGFSKDNNSIITRKEFQEGLKIFFPGVSEFGKESILFHYTDWVDDQRPENYREALGDVVGDYNFICPALEFTKKFSEWGNNAFFYYFEHRSSKLPWPEWMGVMHGYEIEFVFGLPLERRDNYTKAEEILSRSIVKRWANFAKYGNPNETQNNSTSWPVFKSTEQKYLTLNTESTRIMTKLRAQQCRFWTSFFPKVLEMTGNIDEAEWEWKAGFHRWNNYMMDWKNQFNDYTSKKESCVGL

SEQ ID NO: 73 - DNA, 1722 bp, Artificial
  Synthetic butyrylcholinesterase variant
gaagatgacatcataattgcaacaaagaatggaaaagtcagagggatgaacttgacagtttttggtggcacggtaacagcctttcttggaattccctatgcacagccacctcttggtagacttcgattcaaaaagccacagtctctgaccaagtggtctgatatttggaatgccacaaaatatgcaaattcttgctgtcagaacatagatcaaagttttccaggcttccatggatcagagatgtggaacccaaacactgacctcagtgaagactgtttatatctaaatgtatggattccagcacctaaaccaaaaaatgccactgtattgatatggatttatggtggtggttttcaaactggaacatcatctttacatgtttatgatggcaagtttctggctcgggttgaaagagttattgtagtgtcaatgaactatagggtgggtgccctaggattcttagctttgccaggaaatcctgaggctccagggaacatgggtttatttgatcaacagttggctcttcagtgggttcaaaaaaatatagcagcctttggtggaaatcctaaaagtgtaactctctttggagaaagtgcaggagcagcttcagttagcctgcatttgctttctcctggaagccattcattgttcaccagagccattctgcaaagtggttccgckaatgctccttgggcggtaacatctctttatgaagctaggaacagaacgttgaacttagctaaattgactggttgctctagagagaatgagactgaaataatcaagtgtcttagaaataaagatccccaagaaattcttctgaatgaagcatttgttgtcccctatgggactcctttgcgtgtaaactttggtccgaccgtggatggtgattttctcactgacatgccagacatattacttgaacttggacaatttaaaaaaacccagattttggtgggtgttaataaagatgaagggacagcttttttagtctatggtgctcctggcttcagcaaagataacaatagtatcataactagaaaagaatttcaggaaggtttaaaaatattttttccaggagtgagtgagtttggaaaggaatccatcctttttcattacacagactgggtagatgatcagagacctgaaaactaccgtgaggccttgggtgatgttgttggggattataatttcatatgccctgccttggagttcaccaagaagttctcagaatggggaaataatgcctttttctactattttgaacaccgatcctccaaacttccgtggccagaatggatgggagtgatgcatggctatgaaattgaatttgtctttggtttacctctggaaagaagagataattacacaaaagccgaggaaattttgagtagatccatagtgaaacggtgggcaaattttgcaaaatatgggaatccaaatgagactcagaacaatagcacaagctggcctgtcttcaaaagcactgaacaaaaatatctaaccttgaatacagagtcaacaagaataatgacgaaactacgtgctcaacaatgtcgattctggacatcattttttccaaaagtcttggaaatgacaggaaatattgatgaagcagaatgggagtggaaagcaggattccatcgctggaacaattacatgatggactggaaaaatcaatttaacgattacactagcaagaaagaaagttgtgtgggtctc

SEQ ID NO: 74 - protein, 574 aa, Artificial
  Synthetic butyrylcholinesterase variant
  VARIANT (227)..(227): Xaa = Ala
  VARIANT (287)..(287): S287R
EDDIIIATKNGKVRGMNLTVFGGTVTAFLGIPYAQPPLGRLRFKKPQSLTKWSDIWNATKYANSCCQNIDQSFPGFHGSEMWNPNTDLSEDCLYLNVWIPAPKPKNATVLIWIYGGGFQTGTSSLHVYDGKFLARVERVIVVSMNYRVGALGFLALPGNPEAPGNMGLFDQQLALQWVQKNIAAFGGNPKSVTLFGESAGAASVSLHLLSPGSHSLFTRAILQSGSXNAPWAVTSLYEARNRTLNLAKLTGCSRENETEIIKCLRNKDPQEILLNEAFVVPYGTPLRVNFGPTVDGDFLTDMPDILLELGQFKKTQILVGVNKDEGTAFLVYGAPGFSKDNNSIITRKEFQEGLKIFFPGVSEFGKESILFHYTDWVDDQRPENYREALGDVVGDYNFICPALEFTKKFSEWGNNAFFYYFEHRSSKLPWPEWMGVMHGYEIEFVFGLPLERRDNYTKAEEILSRSIVKRWANFAKYGNPNETQNNSTSWPVFKSTEQKYLTLNTESTRIMTKLRAQQCRFWTSFFPKVLEMTGNIDEAEWEWKAGFHRWNNYMMDWKNQFNDYTSKKESCVGL

SEQ ID NO: 75 - DNA, 1722 bp, Artificial
  Synthetic butyrylcholinesterase variant
gaagatgacatcataattgcaacaaagaatggaaaagtcagagggatgaacttgacagtttttggtggcacggtaacagcctttcttggaattccctatgcacagccacctcttggtagacttcgattcaaaaagccacagtctctgaccaagtggtctgatatttggaatgccacaaaatatgcaaattcttgctgtcagaacatagatcaaagttttccaggcttccatggatcagagatgtggaacccaaacactgacctcagtgaagactgtttatatctaaatgtatggattccagcacctaaaccaaaaaatgccactgtattgatatggatttatggtggtggttttcaaactggaacatcatctttacatgtttatgatggcaagtttctggctcgggttgaaagagttattgtagtgtcaatgaactatagggtgggtgccctaggattcttagctttgccaggaaatcctgaggctccagggaacatgggtttatttgatcaacagttggctcttcagtgggttcaaaaaaatatagcagcctttggtggaaatcctaaaagtgtaactctctttggagaaagtgcaggagcagcttcagttagcctgcatttgctttctcctggaagccattcattgttcaccagagccattctgcaaagtggttccgckaatgctccttgggcggtaacatctctttatgaagctaggaacagaacgttgaacttagctaaattgactggttgctctagagagaatgagactgaaataatcaagtgtcttagaaataaagatccccaagaaattcttctgaatgaagcatttgttgtcccctatgggactcctttgactgtaaactttggtccgaccgtggatggtgattttctcactgacatgccagacatattacttgaacttggacaatttaaaaaaacccagattttggtgggtgttaataaagatgaagggacagcttttttagtctatggtgctcctggcttcagcaaagataacaatagtatcataactagaaaagaatttcaggaaggtttaaaaatattttttccaggagtgagtgagtttggaaaggaatccatcctttttcattacacagactgggtagatgatcagagacctgaaaactaccgtgaggccttgggtgatgttgttggggattataatttcatatgccctgccttggagttcaccaagaagttctcagaatggggaaataatgcctttttctactattttgaacaccgatcctccaaacttccgtggccagaatggatgggagtgatgcatggctatgaaattgaatttgtctttggtttacctctggaaagaagagataattacacaaaagccgaggaaattttgagtagatccatagtgaaacggtgggcaaattttgcaaaatatgggaatccaaatgagactcagaacaatagcacaagctggcctgtcttcaaaagcactgaacaaaaatatctaaccttgaatacagagtcaacaagaataatgacgaaactacgtgctcaacaatgtcgattctggacatcattttttccaaaagtcttggaaatgacaggaaatattgatgaagcagaatgggagtggaaagcaggattccatcgctggaacaattacatgatggactggaaaaatcaatttaacgattacactagcaagaaagaaagttgtgtgggtctc

SEQ ID NO: 76 - protein, 574 aa, Artificial
  Synthetic butyrylcholinesterase variant
  VARIANT (227)..(227): Xaa = Ala
  VARIANT (287)..(287): S287T
EDDIIIATKNGKVRGMNLTVFGGTVTAFLGIPYAQPPLGRLRFKKPQSLTKWSDIWNATKYANSCCQNIDQSFPGFHGSEMWNPNTDLSEDCLYLNVWIPAPKPKNATVLIWIYGGGFQTGTSSLHVYDGKFLARVERVIVVSMNYRVGALGFLALPGNPEAPGNMGLFDQQLALQWVQKNIAAFGGNPKSVTLFGESAGAASVSLHLLSPGSHSLFTRAILQSGSXNAPWAVTSLYEARNRTLNLAKLTGCSRENETEIIKCLRNKDPQEILLNEAFVVPYGTPLTVNFGPTVDGDFLTDMPDILLELGQFKKTQILVGVNKDEGTAFLVYGAPGFSKDNNSIITRKEFQEGLKIFFPGVSEFGKESILFHYTDWVDDQRPENYREALGDVVGDYNFICPALEFTKKFSEWGNNAFFYYFEHRSSKLPWPEWMGVMHGYEIEFVFGLPLERRDNYTKAEEILSRSIVKRWANFAKYGNPNETQNNSTSWPVFKSTEQKYLTLNTESTRIMTKLRAQQCRFWTSFFPKVLEMTGNIDEAEWEWKAGFHRWNNYMMDWKNQFNDYTSKKESCVGL

SEQ ID NO: 77 - DNA, 1722 bp, Artificial
  Synthetic butyrylcholinesterase variant
gaagatgacatcataattgcaacaaagaatggaaaagtcagagggatgaacttgacagtttttggtggcacggtaacagcctttcttggaattccctatgcacagccacctcttggtagacttcgattcaaaaagccacagtctctgaccaagtggtctgatatttggaatgccacaaaatatgcaaattcttgctgtcagaacatagatcaaagttttccaggcttccatggatcagagatgtggaacccaaacactgacctcagtgaagactgtttatatctaaatgtatggattccagcacctaaaccaaaaaatgccactgtattgatatggatttatggtggtggttttcaaactggaacatcatctttacatgtttatgatggcaagtttctggctcgggttgaaagagttattgtagtgtcaatgaactatagggtgggtgccctaggattcttagctttgccaggaaatcctgaggctccagggaacatgggtttatttgatcaacagttggctcttcagtgggttcaaaaaaatatagcagcctttggtggaaatcctaaaagtgtaactctctttggagaaagtgcaggagcagcttcagttagcctgcatttgctttctcctggaagccattcattgttcaccagagccattctgcaaagtggttccgckaatgctccttgggcggtaacatctctttatgaagctaggaacagaacgttgaacttagctaaattgactggttgctctagagagaatgagactgaaataatcaagtgtcttagaaataaagatccccaagaaattcttctgaatgaagcatttgttgtcccctatgggactcctttgtcagtaaactttggtccgaccgtggatggtgattttctcactgacatgccagacatattacttgaacttggacaatttaaaaaaacccagattttggtgggtgttaataaagatgaaggggctgcttttttagtctatggtgctcctggcttcagcaaagataacaatagtatcataactagaaaagaatttcaggaaggtttaaaaatattttttccaggagtgagtgagtttggaaaggaatccatcctttttcattacacagactgggtagatgatcagagacctgaaaactaccgtgaggccttgggtgatgttgttggggattataatttcatatgccctgccttggagttcaccaagaagttctcagaatggggaaataatgcctttttctactattttgaacaccgatcctccaaacttccgtggccagaatggatgggagtgatgcatggctatgaaattgaatttgtctttggtttacctctggaaagaagagataattacacaaaagccgaggaaattttgagtagatccatagtgaaacggtgggcaaattttgcaaaatatgggaatccaaatgagactcagaacaatagcacaagctggcctgtcttcaaaagcactgaacaaaaatatctaaccttgaatacagagtcaacaagaataatgacgaaactacgtgctcaacaatgtcgattctggacatcattttttccaaaagtcttggaaatgacaggaaatattgatgaagcagaatgggagtggaaagcaggattccatcgctggaacaattacatgatggactggaaaaatcaatttaacgattacactagcaagaaagaaagttgtgtgggtctc

SEQ ID NO: 78 - protein, 574 aa, Artificial
  Synthetic butyrylcholinesterase variant
  VARIANT (227)..(227): Xaa = Ala
  VARIANT (327)..(327): T327A
EDDIIIATKNGKVRGMNLTVFGGTVTAFLGIPYAQPPLGRLRFKKPQSLTKWSDIWNATKYANSCCQNIDQSFPGFHGSEMWNPNTDLSEDCLYLNVWIPAPKPKNATVLIWIYGGGFQTGTSSLHVYDGKFLARVERVIVVSMNYRVGALGFLALPGNPEAPGNMGLFDQQLALQWVQKNIAAFGGNPKSVTLFGESAGAASVSLHLLSPGSHSLFTRAILQSGSXNAPWAVTSLYEARNRTLNLAKLTGCSRENETEIIKCLRNKDPQEILLNEAFVVPYGTPLSVNFGPTVDGDFLTDMPDILLELGQFKKTQILVGVNKDEGAAFLVYGAPGFSKDNNSIITRKEFQEGLKIFFPGVSEFGKESILFHYTDWVDDQRPENYREALGDVVGDYNFICPALEFTKKFSEWGNNAFFYYFEHRSSKLPWPEWMGVMHGYEIEFVFGLPLERRDNYTKAEEILSRSIVKRWANFAKYGNPNETQNNSTSWPVFKSTEQKYLTLNTESTRIMTKLRAQQCRFWTSFFPKVLEMTGNIDEAEWEWKAGFHRWNNYMMDWKNQFNDYTSKKESCVGL

SEQ ID NO: 79 - DNA, 1722 bp, Artificial
  Synthetic butyrylcholinesterase variant
gaagatgacatcataattgcaacaaagaatggaaaagtcagagggatgaacttgacagtttttggtggcacggtaacagcctttcttggaattccctatgcacagccacctcttggtagacttcgattcaaaaagccacagtctctgaccaagtggtctgatatttggaatgccacaaaatatgcaaattcttgctgtcagaacatagatcaaagttttccaggcttccatggatcagagatgtggaacccaaacactgacctcagtgaagactgtttatatctaaatgtatggattccagcacctaaaccaaaaaatgccactgtattgatatggatttatggtggtggttttcaaactggaacatcatctttacatgtttatgatggcaagtttctggctcgggttgaaagagttattgtagtgtcaatgaactatagggtgggtgccctaggattcttagctttgccaggaaatcctgaggctccagggaacatgggtttatttgatcaacagttggctcttcagtgggttcaaaaaaatatagcagcctttggtggaaatcctaaaagtgtaactctctttggagaaagtgcaggagcagcttcagttagcctgcatttgctttctcctggaagccattcattgttcaccagagccattctgcaaagtggttccgckaatgctccttgggcggtaacatctctttatgaagctaggaacagaacgttgaacttagctaaattgactggttgctctagagagaatgagactgaaataatcaagtgtcttagaaataaagatccccaagaaattcttctgaatgaagcatttgttgtcccctatgggactcctttgtcagtaaactttggtccgaccgtggatggtgattttctcactgacatgccagacatattacttgaacttggacaatttaaaaaaacccagattttggtgggtgttaataaagatgaagggcctgcttttttagtctatggtgctcctggcttcagcaaagataacaatagtatcataactagaaaagaatttcaggaaggtttaaaaatattttttccaggagtgagtgagtttggaaaggaatccatcctttttcattacacagactgggtagatgatcagagacctgaaaactaccgtgaggccttgggtgatgttgttggggattataatttcatatgccctgccttggagttcaccaagaagttctcagaatggggaaataatgcctttttctactattttgaacaccgatcctccaaacttccgtggccagaatggatgggagtgatgcatggctatgaaattgaatttgtctttggtttacctctggaaagaagagataattacacaaaagccgaggaaattttgagtagatccatagtgaaacggtgggcaaattttgcaaaatatgggaatccaaatgagactcagaacaatagcacaagctggcctgtcttcaaaagcactgaacaaaaatatctaaccttgaatacagagtcaacaagaataatgacgaaactacgtgctcaacaatgtcgattctggacatcattttttccaaaagtcttggaaatgacaggaaatattgatgaagcagaatgggagtggaaagcaggattccatcgctggaacaattacatgatggactggaaaaatcaatttaacgattacactagcaagaaagaaagttgtgtgggtctc

SEQ ID NO: 80 - protein, 574 aa, Artificial
  Synthetic butyrylcholinesterase variant
  VARIANT (227)..(227): Xaa = Ala
  VARIANT (327)..(327): T327P
EDDIIIATKNGKVRGMNLTVFGGTVTAFLGIPYAQPPLGRLRFKKPQSLTKWSDIWNATKYANSCCQNIDQSFPGFHGSEMWNPNTDLSEDCLYLNVWIPAPKPKNATVLIWIYGGGFQTGTSSLHVYDGKFLARVERVIVVSMNYRVGALGFLALPGNPEAPGNMGLFDQQLALQWVQKNIAAFGGNPKSVTLFGESAGAASVSLHLLSPGSHSLFTRAILQSGSXNAPWAVTSLYEARNRTLNLAKLTGCSRENETEIIKCLRNKDPQEILLNEAFVVPYGTPLSVNFGPTVDGDFLTDMPDILLELGQFKKTQILVGVNKDEGPAFLVYGAPGFSKDNNSIITRKEFQEGLKIFFPGVSEFGKESILFHYTDWVDDQRPENYREALGDVVGDYNFICPALEFTKKFSEWGNNAFFYYFEHRSSKLPWPEWMGVMHGYEIEFVFGLPLERRDNYTKAEEILSRSIVKRWANFAKYGNPNETQNNSTSWPVFKSTEQKYLTLNTESTRIMTKLRAQQCRFWTSFFPKVLEMTGNIDEAEWEWKAGFHRWNNYMMDWKNQFNDYTSKKESCVGL

SEQ ID NO: 81 - DNA, 1722 bp, Artificial
  Synthetic butyrylcholinesterase variant
gaagatgacatcataattgcaacaaagaatggaaaagtcagagggatgaacttgacagtttttggtggcacggtaacagcctttcttggaattccctatgcacagccacctcttggtagacttcgattcaaaaagccacagtctctgaccaagtggtctgatatttggaatgccacaaaatatgcaaattcttgctgtcagaacatagatcaaagttttccaggcttccatggatcagagatgtggaacccaaacactgacctcagtgaagactgtttatatctaaatgtatggattccagcacctaaaccaaaaaatgccactgtattgatatggatttatggtggtggttttcaaactggaacatcatctttacatgtttatgatggcaagtttctggctcgggttgaaagagttattgtagtgtcaatgaactatagggtgggtgccctaggattcttagctttgccaggaaatcctgaggctccagggaacatgggtttatttgatcaacagttggctcttcagtgggttcaaaaaaatatagcagcctttggtggaaatcctaaaagtgtaactctctttggagaaagtgcaggagcagcttcagttagcctgcatttgctttctcctggaagccattcattgttcaccagagccattctgcaaagtggttccgckaatgctccttgggcggtaacatctctttatgaagctaggaacagaacgttgaacttagctaaattgactggttgctctagagagaatgagactgaaataatcaagtgtcttagaaataaagatccccaagaaattcttctgaatgaagcatttgttgtcccctatgggactcctttgtcagtaaactttggtccgaccgtggatggtgattttctcactgacatgccagacatattacttgaacttggacaatttaaaaaaacccagattttggtgggtgttaataaagatgaagggacagctcttttagtctatggtgctcctggcttcagcaaagataacaatagtatcataactagaaaagaatttcaggaaggtttaaaaatattttttccaggagtgagtgagtttggaaaggaatccatcctttttcattacacagactgggtagatgatcagagacctgaaaactaccgtgaggccttgggtgatgttgttggggattataatttcatatgccctgccttggagttcaccaagaagttctcagaatggggaaataatgcctttttctactattttgaacaccgatcctccaaacttccgtggccagaatggatgggagtgatgcatggctatgaaattgaatttgtctttggtttacctctggaaagaagagataattacacaaaagccgaggaaattttgagtagatccatagtgaaacggtgggcaaattttgcaaaatatgggaatccaaatgagactcagaacaatagcacaagctggcctgtcttcaaaagcactgaacaaaaatatctaaccttgaatacagagtcaacaagaataatgacgaaactacgtgctcaacaatgtcgattctggacatcattttttccaaaagtcttggaaatgacaggaaatattgatgaagcagaatgggagtggaaagcaggattccatcgctggaacaattacatgatggactggaaaaatcaatttaacgattacactagcaagaaagaaagttgtgtgggtctc

SEQ ID NO: 82 - protein, 574 aa, Artificial
  Synthetic butyrylcholinesterase variant
  VARIANT (227)..(227): Xaa = Ala
  VARIANT (329)..(329): F329L
EDDIIIATKNGKVRGMNLTVFGGTVTAFLGIPYAQPPLGRLRFKKPQSLTKWSDIWNATKYANSCCQNIDQSFPGFHGSEMWNPNTDLSEDCLYLNVWIPAPKPKNATVLIWIYGGGFQTGTSSLHVYDGKFLARVERVIVVSMNYRVGALGFLALPGNPEAPGNMGLFDQQLALQWVQKNIAAFGGNPKSVTLFGESAGAASVSLHLLSPGSHSLFTRAILQSGSXNAPWAVTSLYEARNRTLNLAKLTGCSRENETEIIKCLRNKDPQEILLNEAFVVPYGTPLSVNFGPTVDGDFLTDMPDILLELGQFKKTQILVGVNKDEGTALLVYGAPGFSKDNNSIITRKEFQEGLKIFFPGVSEFGKESILFHYTDWVDDQRPENYREALGDVVGDYNFICPALEFTKKFSEWGNNAFFYYFEHRSSKLPWPEWMGVMHGYEIEFVFGLPLERRDNYTKAEEILSRSIVKRWANFAKYGNPNETQNNSTSWPVFKSTEQKYLTLNTESTRIMTKLRAQQCRFWTSFFPKVLEMTGNIDEAEWEWKAGFHRWNNYMMDWKNQFNDYTSKKESCVGL

SEQ ID NO: 83 - DNA, 1722 bp, Artificial
  Synthetic butyrylcholinesterase variant
gaagatgacatcataattgcaacaaagaatggaaaagtcagagggatgaacttgacagtttttggtggcacggtaacagcctttcttggaattccctatgcacagccacctcttggtagacttcgattcaaaaagccacagtctctgaccaagtggtctgatatttggaatgccacaaaatatgcaaattcttgctgtcagaacatagatcaaagttttccaggcttccatggatcagagatgtggaacccaaacactgacctcagtgaagactgtttatatctaaatgtatggattccagcacctaaaccaaaaaatgccactgtattgatatggatttatggtggtggttttcaaactggaacatcatctttacatgtttatgatggcaagtttctggctcgggttgaaagagttattgtagtgtcaatgaactatagggtgggtgccctaggattcttagctttgccaggaaatcctgaggctccagggaacatgggtttatttgatcaacagttggctcttcagtgggttcaaaaaaatatagcagcctttggtggaaatcctaaaagtgtaactctctttggagaaagtgcaggagcagcttcagttagcctgcatttgctttctcctggaagccattcattgttcaccagagccattctgcaaagtggttccgckaatgctccttgggcggtaacatctctttatgaagctaggaacagaacgttgaacttagctaaattgactggttgctctagagagaatgagactgaaataatcaagtgtcttagaaataaagatccccaagaaattcttctgaatgaagcatttgttgtcccctatgggactcctttgtcagtaaactttggtccgaccgtggatggtgattttctcactgacatgccagacatattacttgaacttggacaatttaaaaaaacccagattttggtgggtgttaataaagatgaagggacagctttttcggtctatggtgctcctggcttcagcaaagataacaatagtatcataactagaaaagaatttcaggaaggtttaaaaatattttttccaggagtgagtgagtttggaaaggaatccatcctttttcattacacagactgggtagatgatcagagacctgaaaactaccgtgaggccttgggtgatgttgttggggattataatttcatatgccctgccttggagttcaccaagaagttctcagaatggggaaataatgcctttttctactattttgaacaccgatcctccaaacttccgtggccagaatggatgggagtgatgcatggctatgaaattgaatttgtctttggtttacctctggaaagaagagataattacacaaaagccgaggaaattttgagtagatccatagtgaaacggtgggcaaattttgcaaaatatgggaatccaaatgagactcagaacaatagcacaagctggcctgtcttcaaaagcactgaacaaaaatatctaaccttgaatacagagtcaacaagaataatgacgaaactacgtgctcaacaatgtcgattctggacatcattttttccaaaagtcttggaaatgacaggaaatattgatgaagcagaatgggagtggaaagcaggattccatcgctggaacaattacatgatggactggaaaaatcaatttaacgattacactagcaagaaagaaagttgtgtgggtctc

SEQ ID NO: 84 - protein, 574 aa, Artificial
  Synthetic butyrylcholinesterase variant
  VARIANT (227)..(227): Xaa = Ala
  VARIANT (330)..(330): L330S
EDDIIIATKNGKVRGMNLTVFGGTVTAFLGIPYAQPPLGRLRFKKPQSLTKWSDIWNATKYANSCCQNIDQSFPGFHGSEMWNPNTDLSEDCLYLNVWIPAPKPKNATVLIWIYGGGFQTGTSSLHVYDGKFLARVERVIVVSMNYRVGALGFLALPGNPEAPGNMGLFDQQLALQWVQKNIAAFGGNPKSVTLFGESAGAASVSLHLLSPGSHSLFTRAILQSGSXNAPWAVTSLYEARNRTLNLAKLTGCSRENETEIIKCLRNKDPQEILLNEAFVVPYGTPLSVNFGPTVDGDFLTDMPDILLELGQFKKTQILVGVNKDEGTAFSVYGAPGFSKDNNSIITRKEFQEGLKIFFPGVSEFGKESILFHYTDWVDDQRPENYREALGDVVGDYNFICPALEFTKKFSEWGNNAFFYYFEHRSSKLPWPEWMGVMHGYEIEFVFGLPLERRDNYTKAEEILSRSIVKRWANFAKYGNPNETQNNSTSWPVFKSTEQKYLTLNTESTRIMTKLRAQQCRFWTSFFPKVLEMTGNIDEAEWEWKAGFHRWNNYMMDWKNQFNDYTSKKESCVGL

SEQ ID NO: 85 - DNA, 1722 bp, Artificial
  Synthetic butyrylcholinesterase variant
gaagatgacatcataattgcaacaaagaatggaaaagtcagagggatgaacttgacagtttttggtggcacggtaacagcctttcttggaattccctatgcacagccacctcttggtagacttcgattcaaaaagccacagtctctgaccaagtggtctgatatttggaatgccacaaaatatgcaaattcttgctgtcagaacatagatcaaagttttccaggcttccatggatcagagatgtggaacccaaacactgacctcagtgaagactgtttatatctaaatgtatggattccagcacctaaaccaaaaaatgccactgtattgatatggatttatggtggtggttttcaaactggaacatcatctttacatgtttatgatggcaagtttctggctcgggttgaaagagttattgtagtgtcaatgaactatagggtgggtgccctaggattcttagctttgccaggaaatcctgaggctccagggaacatgggtttatttgatcaacagttggctcttcagtgggttcaaaaaaatatagcagcctttggtggaaatcctaaaagtgtaactctctttggagaaagtgcaggagcagcttcagttagcctgcatttgctttctcctggaagccattcattgttcaccagagccattctgcaaagtggttccgckaatgctccttgggcggtaacatctctttatgaagctaggaacagaacgttgaacttagctaaattgactggttgctctagagagaatgagactgaaataatcaagtgtcttagaaataaagatccccaagaaattcttctgaatgaagcatttgttgtcccctatgggactcctttgtcagtaaactttggtccgaccgtggatggtgattttctcactgacatgccagacatattacttgaacttggacaatttaaaaaaacccagattttggtgggtgttaataaagatgaagggacagcttttttagcgtatggtgctcctggcttcagcaaagataacaatagtatcataactagaaaagaatttcaggaaggtttaaaaatattttttccaggagtgagtgagtttggaaaggaatccatcctttttcattacacagactgggtagatgatcagagacctgaaaactaccgtgaggccttgggtgatgttgttggggattataatttcatatgccctgccttggagttcaccaagaagttctcagaatggggaaataatgcctttttctactattttgaacaccgatcctccaaacttccgtggccagaatggatgggagtgatgcatggctatgaaattgaatttgtctttggtttacctctggaaagaagagataattacacaaaagccgaggaaattttgagtagatccatagtgaaacggtgggcaaattttgcaaaatatgggaatccaaatgagactcagaacaatagcacaagctggcctgtcttcaaaagcactgaacaaaaatatctaaccttgaatacagagtcaacaagaataatgacgaaactacgtgctcaacaatgtcgattctggacatcattttttccaaaagtcttggaaatgacaggaaatattgatgaagcagaatgggagtggaaagcaggattccatcgctggaacaattacatgatggactggaaaaatcaatttaacgattacactagcaagaaagaaagttgtgtgggtctc

SEQ ID NO: 86 - protein, 574 aa, Artificial
  Synthetic butyrylcholinesterase variant
  VARIANT (227)..(227): Xaa = Ala
  VARIANT (331)..(331): V331A
EDDIIIATKNGKVRGMNLTVFGGTVTAFLGIPYAQPPLGRLRFKKPQSLTKWSDIWNATKYANSCCQNIDQSFPGFHGSEMWNPNTDLSEDCLYLNVWIPAPKPKNATVLIWIYGGGFQTGTSSLHVYDGKFLARVERVIVVSMNYRVGALGFLALPGNPEAPGNMGLFDQQLALQWVQKNIAAFGGNPKSVTLFGESAGAASVSLHLLSPGSHSLFTRAILQSGSXNAPWAVTSLYEARNRTLNLAKLTGCSRENETEIIKCLRNKDPQEILLNEAFVVPYGTPLSVNFGPTVDGDFLTDMPDILLELGQFKKTQILVGVNKDEGTAFLAYGAPGFSKDNNSIITRKEFQEGLKIFFPGVSEFGKESILFHYTDWVDDQRPENYREALGDVVGDYNFICPALEFTKKFSEWGNNAFFYYFEHRSSKLPWPEWMGVMHGYEIEFVFGLPLERRDNYTKAEEILSRSIVKRWANFAKYGNPNETQNNSTSWPVFKSTEQKYLTLNTESTRIMTKLRAQQCRFWTSFFPKVLEMTGNIDEAEWEWKAGFHRWNNYMMDWKNQFNDYTSKKESCVGL

SEQ ID NO: 87 - DNA, 1722 bp, Artificial
  Synthetic butyrylcholinesterase variant
gaagatgacatcataattgcaacaaagaatggaaaagtcagagggatgaacttgacagtttttggtggcacggtaacagcctttcttggaattccctatgcacagccacctcttggtagacttcgattcaaaaagccacagtctctgaccaagtggtctgatatttggaatgccacaaaatatgcaaattcttgctgtcagaacatagatcaaagttttccaggcttccatggatcagagatgtggaacccaaacactgacctcagtgaagactgtttatatctaaatgtatggattccagcacctaaaccaaaaaatgccactgtattgatatggatttatggtggtggttttcaaactggaacatcatctttacatgtttatgatggcaagtttctggctcgggttgaaagagttattgtagtgtcaatgaactatagggtgggtgccctaggattcttagctttgccaggaaatcctgaggctccagggaacatgggtttatttgatcaacagttggctcttcagtgggttcaaaaaaatatagcagcctttggtggaaatcctaaaagtgtaactctctttggagaaagtgcaggagcagcttcagttagcctgcatttgctttctcctggaagccattcattgttcaccagagccattctgcaaagtggttccgckaatgctccttgggcggtaacatctctttatgaagctaggaacagaacgttgaacttagctaaattgactggttgctctagagagaatgagactgaaataatcaagtgtcttagaaataaagatccccaagaaattcttctgaatgaagcatttgttgtcccctatgggactcctttgtcagtaaactttggtccgaccgtggatggtgattttctcactgacatgccagacatattacttgaacttggacaatttaaaaaaacccagattttggtgggtgttaataaagatgaagggacagcttttttaggttatggtgctcctggcttcagcaaagataacaatagtatcataactagaaaagaatttcaggaaggtttaaaaatattttttccaggagtgagtgagtttggaaaggaatccatcctttttcattacacagactgggtagatgatcagagacctgaaaactaccgtgaggccttgggtgatgttgttggggattataatttcatatgccctgccttggagttcaccaagaagttctcagaatggggaaataatgcctttttctactattttgaacaccgatcctccaaacttccgtggccagaatggatgggagtgatgcatggctatgaaattgaatttgtctttggtttacctctggaaagaagagataattacacaaaagccgaggaaattttgagtagatccatagtgaaacggtgggcaaattttgcaaaatatgggaatccaaatgagactcagaacaatagcacaagctggcctgtcttcaaaagcactgaacaaaaatatctaaccttgaatacagagtcaacaagaataatgacgaaactacgtgctcaacaatgtcgattctggacatcattttttccaaaagtcttggaaatgacaggaaatattgatgaagcagaatgggagtggaaagcaggattccatcgctggaacaattacatgatggactggaaaaatcaatttaacgattacactagcaagaaagaaagttgtgtgggtctc

SEQ ID NO: 88 - protein, 574 aa, Artificial
  Synthetic butyrylcholinesterase variant
  VARIANT (227)..(227): Xaa = Ala
  VARIANT (331)..(331): V331G
EDDIIIATKNGKVRGMNLTVFGGTVTAFLGIPYAQPPLGRLRFKKPQSLTKWSDIWNATKYANSCCQNIDQSFPGFHGSEMWNPNTDLSEDCLYLNVWIPAPKPKNATVLIWIYGGGFQTGTSSLHVYDGKFLARVERVIVVSMNYRVGALGFLALPGNPEAPGNMGLFDQQLALQWVQKNIAAFGGNPKSVTLFGESAGAASVSLHLLSPGSHSLFTRAILQSGSXNAPWAVTSLYEARNRTLNLAKLTGCSRENETEIIKCLRNKDPQEILLNEAFVVPYGTPLSVNFGPTVDGDFLTDMPDILLELGQFKKTQILVGVNKDEGTAFLGYGAPGFSKDNNSIITRKEFQEGLKIFFPGVSEFGKESILFHYTDWVDDQRPENYREALGDVVGDYNFICPALEFTKKFSEWGNNAFFYYFEHRSSKLPWPEWMGVMHGYEIEFVFGLPLERRDNYTKAEEILSRSIVKRWANFAKYGNPNETQNNSTSWPVFKSTEQKYLTLNTESTRIMTKLRAQQCRFWTSFFPKVLEMTGNIDEAEWEWKAGFHRWNNYMMDWKNQFNDYTSKKESCVGL

SEQ ID NO: 89 - DNA, 1722 bp, Artificial
  Synthetic butyrylcholinesterase variant
gaagatgacatcataattgcaacaaagaatggaaaagtcagagggatgaacttgacagtttttggtggcacggtaacagcctttcttggaattccctatgcacagccacctcttggtagacttcgattcaaaaagccacagtctctgaccaagtggtctgatatttggaatgccacaaaatatgcaaattcttgctgtcagaacatagatcaaagttttccaggcttccatggatcagagatgtggaacccaaacactgacctcagtgaagactgtttatatctaaatgtatggattccagcacctaaaccaaaaaatgccactgtattgatatggatttatggtggtggttttcaaactggaacatcatctttacatgtttatgatggcaagtttctggctcgggttgaaagagttattgtagtgtcaatgaactatagggtgggtgccctaggattcttagctttgccaggaaatcctgaggctccagggaacatgggtttatttgatcaacagttggctcttcagtgggttcaaaaaaatatagcagcctttggtggaaatcctaaaagtgtaactctctttggagaaagtgcaggagcagcttcagttagcctgcatttgctttctcctggaagccattcattgttcaccagagccattctgcaaagtggttccgckaatgctccttgggcggtaacatctctttatgaagctaggaacagaacgttgaacttagctaaattgactggttgctctagagagaatgagactgaaataatcaagtgtcttagaaataaagatccccaagaaattcttctgaatgaagcatttgttgtcccctatgggactcctttgtcagtaaactttggtccgaccgtggatggtgattttctcactgacatgccagacatattacttgaacttggacaatttaaaaaaacccagattttggtgggtgttaataaagatgaagggacagcttttttaccttatggtcctcctggcttcagcaaagataacaatagtatcataactagaaaagaatttcaggaaggtttaaaaatattttttccaggagtgagtgagtttggaaaggaatccatcctttttcattacacagactgggtagatgatcagagacctgaaaactaccgtgaggccttgggtgatgttgttggggattataatttcatatgccctgccttggagttcaccaagaagttctcagaatggggaaataatgcctttttctactattttgaacaccgatcctccaaacttccgtggccagaatggatgggagtgatgcatggctatgaaattgaatttgtctttggtttacctctggaaagaagagataattacacaaaagccgaggaaattttgagtagatccatagtgaaacggtgggcaaattttgcaaaatatgggaatccaaatgagactcagaacaatagcacaagctggcctgtcttcaaaagcactgaacaaaaatatctaaccttgaatacagagtcaacaagaataatgacgaaactacgtgctcaacaatgtcgattctggacatcattttttccaaaagtcttggaaatgacaggaaatattgatgaagcagaatgggagtggaaagcaggattccatcgctggaacaattacatgatggactggaaaaatcaatttaacgattacactagcaagaaagaaagttgtgtgggtctc

SEQ ID NO: 90 - protein, 574 aa, Artificial
  Synthetic butyrylcholinesterase variant
  VARIANT (227)..(227): Xaa = Ala
  VARIANT (331)..(331): V331P
EDDIIIATKNGKVRGMNLTVFGGTVTAFLGIPYAQPPLGRLRFKKPQSLTKWSDIWNATKYANSCCQNIDQSFPGFHGSEMWNPNTDLSEDCLYLNVWIPAPKPKNATVLIWIYGGGFQTGTSSLHVYDGKFLARVERVIVVSMNYRVGALGFLALPGNPEAPGNMGLFDQQLALQWVQKNIAAFGGNPKSVTLFGESAGAASVSLHLLSPGSHSLFTRAILQSGSXNAPWAVTSLYEARNRTLNLAKLTGCSRENETEIIKCLRNKDPQEILLNEAFVVPYGTPLSVNFGPTVDGDFLTDMPDILLELGQFKKTQILVGVNKDEGTAFLPYGPPGFSKDNNSIITRKEFQEGLKIFFPGVSEFGKESILFHYTDWVDDQRPENYREALGDVVGDYNFICPALEFTKKFSEWGNNAFFYYFEHRSSKLPWPEWMGVMHGYEIEFVFGLPLERRDNYTKAEEILSRSIVKRWANFAKYGNPNETQNNSTSWPVFKSTEQKYLTLNTESTRIMTKLRAQQCRFWTSFFPKVLEMTGNIDEAEWEWKAGFHRWNNYMMDWKNQFNDYTSKKESCVGL

SEQ ID NO: 91 - DNA, 1722 bp, Artificial
  Synthetic butyrylcholinesterase variant
gaagatgacatcataattgcaacaaagaatggaaaagtcagagggatgaacttgacagtttttggtggcacggtaacagcctttcttggaattccctatgcacagccacctcttggtagacttcgattcaaaaagccacagtctctgaccaagtggtctgatatttggaatgccacaaaatatgcaaattcttgctgtcagaacatagatcaaagttttccaggcttccatggatcagagatgtggaacccaaacactgacctcagtgaagactgtttatatctaaatgtatggattccagcacctaaaccaaaaaatgccactgtattgatatggatttatggtggtggttttcaaactggaacatcatctttacatgtttatgatggcaagtttctggctcgggttgaaagagttattgtagtgtcaatgaactatagggtgggtgccctaggattcttagctttgccaggaaatcctgaggctccagggaacatgggtttatttgatcaacagttggctcttcagtgggttcaaaaaaatatagcagcctttggtggaaatcctaaaagtgtaactctctttggagaaagtgcaggagcagcttcagttagcctgcatttgctttctcctggaagccattcattgttcaccagagccattctgcaaagtggttccgckaatgctccttgggcggtaacatctctttatgaagctaggaacagaacgttgaacttagctaaattgactggttgctctagagagaatgagactgaaataatcaagtgtcttagaaataaagatccccaagaaattcttctgaatgaagcatttgttgtcccctatgggactcctttgtcagtaaactttggtccgaccgtggatggtgattttctcactgacatgccagacatattacttgaacttggacaatttaaaaaaacccagattttggtgggtgttaataaagatgaagggacagcttttttatcttatggtgctcctggcttcagcaaagataacaatagtatcataactagaaaagaatttcaggaaggtttaaaaatattttttccaggagtgagtgagtttggaaaggaatccatcctttttcattacacagactgggtagatgatcagagacctgaaaactaccgtgaggccttgggtgatgttgttggggattataatttcatatgccctgccttggagttcaccaagaagttctcagaatggggaaataatgcctttttctactattttgaacaccgatcctccaaacttccgtggccagaatggatgggagtgatgcatggctatgaaattgaatttgtctttggtttacctctggaaagaagagataattacacaaaagccgaggaaattttgagtagatccatagtgaaacggtgggcaaattttgcaaaatatgggaatccaaatgagactcagaacaatagcacaagctggcctgtcttcaaaagcactgaacaaaaatatctaaccttgaatacagagtcaacaagaataatgacgaaactacgtgctcaacaatgtcgattctggacatcattttttccaaaagtcttggaaatgacaggaaatattgatgaagcagaatgggagtggaaagcaggattccatcgctggaacaattacatgatggactggaaaaatcaatttaacgattacactagcaagaaagaaagttgtgtgggtctc

SEQ ID NO: 92 - protein, 574 aa, Artificial
  Synthetic butyrylcholinesterase variant
  VARIANT (227)..(227): Xaa = Ala
  VARIANT (331)..(331): V331S
EDDIIIATKNGKVRGMNLTVFGGTVTAFLGIPYAQPPLGRLRFKKPQSLTKWSDIWNATKYANSCCQNIDQSFPGFHGSEMWNPNTDLSEDCLYLNVWIPAPKPKNATVLIWIYGGGFQTGTSSLHVYDGKFLARVERVIVVSMNYRVGALGFLALPGNPEAPGNMGLFDQQLALQWVQKNIAAFGGNPKSVTLFGESAGAASVSLHLLSPGSHSLFTRAILQSGSXNAPWAVTSLYEARNRTLNLAKLTGCSRENETEIIKCLRNKDPQEILLNEAFVVPYGTPLSVNFGPTVDGDFLTDMPDILLELGQFKKTQILVGVNKDEGTAFLSYGAPGFSKDNNSIITRKEFQEGLKIFFPGVSEFGKESILFHYTDWVDDQRPENYREALGDVVGDYNFICPALEFTKKFSEWGNNAFFYYFEHRSSKLPWPEWMGVMHGYEIEFVFGLPLERRDNYTKAEEILSRSIVKRWANFAKYGNPNETQNNSTSWPVFKSTEQKYLTLNTESTRIMTKLRAQQCRFWTSFFPKVLEMTGNIDEAEWEWKAGFHRWNNYMMDWKNQFNDYTSKKESCVGL

SEQ ID NO: 93 - DNA, 1722 bp, Artificial
  Synthetic butyrylcholinesterase variant
gaagatgacatcataattgcaacaaagaatggaaaagtcagagggatgaacttgacagtttttggtggcacggtaacagcctttcttggaattccctatgcacagccacctcttggtagacttcgattcaaaaagccacagtctctgaccaagtggtctgatatttggaatgccacaaaatatgcaaattcttgctgtcagaacatagatcaaagttttccaggcttccatggatcagagatgtggaacccaaacactgacctcagtgaagactgtttatatctaaatgtatggattccagcacctaaaccaaaaaatgccactgtattgatatggatttatggtggtggttttcaaactggaacatcatctttacatgtttatgatggcaagtttctggctcgggttgaaagagttattgtagtgtcaatgaactatagggtgggtgccctaggattcttagctttgccaggaaatcctgaggctccagggaacatgggtttatttgatcaacagttggctcttcagtgggttcaaaaaaatatagcagcctttggtggaaatcctaaaagtgtaactctctttggagaaagtgcaggagcagcttcagttagcctgcatttgctttctcctggaagccattcattgttcaccagagccattctgcaaagtggttccgckaatgctccttgggcggtaacatctctttatgaagctaggaacagaacgttgaacttagctaaattgactggttgctctagagagaatgagactgaaataatcaagtgtcttagaaataaagatccccaagaaattcttctgaatgaagcatttgttgtcccctatgggactcctttgtcagtaaactttggtccgaccgtggatggtgattttctcactgacatgccagacatattacttgaacttggacaatttaaaaaaacccagattttggtgggtgttaataaagatgaagggacagcttttttaacttatggtgctcctggcttcagcaaagataacaatagtatcataactagaaaagaatttcaggaaggtttaaaaatattttttccaggagtgagtgagtttggaaaggaatccatcctttttcattacacagactgggtagatgatcagagacctgaaaactaccgtgaggccttgggtgatgttgttggggattataatttcatatgccctgccttggagttcaccaagaagttctcagaatggggaaataatgcctttttctactattttgaacaccgatcctccaaacttccgtggccagaatggatgggagtgatgcatggctatgaaattgaatttgtctttggtttacctctggaaagaagagataattacacaaaagccgaggaaattttgagtagatccatagtgaaacggtgggcaaattttgcaaaatatgggaatccaaatgagactcagaacaatagcacaagctggcctgtcttcaaaagcactgaacaaaaatatctaaccttgaatacagagtcaacaagaataatgacgaaactacgtgctcaacaatgtcgattctggacatcattttttccaaaagtcttggaaatgacaggaaatattgatgaagcagaatgggagtggaaagcaggattccatcgctggaacaattacatgatggactggaaaaatcaatttaacgattacactagcaagaaagaaagttgtgtgggtctc

SEQ ID NO: 94 - protein, 574 aa, Artificial
  Synthetic butyrylcholinesterase variant
  VARIANT (227)..(227): Xaa = Ala
  VARIANT (331)..(331): V331T
EDDIIIATKNGKVRGMNLTVFGGTVTAFLGIPYAQPPLGRLRFKKPQSLTKWSDIWNATKYANSCCQNIDQSFPGFHGSEMWNPNTDLSEDCLYLNVWIPAPKPKNATVLIWIYGGGFQTGTSSLHVYDGKFLARVERVIVVSMNYRVGALGFLALPGNPEAPGNMGLFDQQLALQWVQKNIAAFGGNPKSVTLFGESAGAASVSLHLLSPGSHSLFTRAILQSGSXNAPWAVTSLYEARNRTLNLAKLTGCSRENETEIIKCLRNKDPQEILLNEAFVVPYGTPLSVNFGPTVDGDFLTDMPDILLELGQFKKTQILVGVNKDEGTAFLTYGAPGFSKDNNSIITRKEFQEGLKIFFPGVSEFGKESILFHYTDWVDDQRPENYREALGDVVGDYNFICPALEFTKKFSEWGNNAFFYYFEHRSSKLPWPEWMGVMHGYEIEFVFGLPLERRDNYTKAEEILSRSIVKRWANFAKYGNPNETQNNSTSWPVFKSTEQKYLTLNTESTRIMTKLRAQQCRFWTSFFPKVLEMTGNIDEAEWEWKAGFHRWNNYMMDWKNQFNDYTSKKESCVGL

SEQ ID NO: 95 - DNA, 1722 bp, Artificial
  Synthetic butyrylcholinesterase variant
gaagatgacatcataattgcaacaaagaatggaaaagtcagagggatgaacttgacagtttttggtggcacggtaacagcctttcttggaattccctatgcacagccacctcttggtagacttcgattcaaaaagccacagtctctgaccaagtggtctgatatttggaatgccacaaaatatgcaaattcttgctgtcagaacatagatcaaagttttccaggcttccatggatcagagatgtggaacccaaacactgacctcagtgaagactgtttatatctaaatgtatggattccagcacctaaaccaaaaaatgccactgtattgatatggatttatggtggtggttttcaaactggaacatcatctttacatgtttatgatggcaagtttctggctcgggttgaaagagttattgtagtgtcaatgaactatagggtgggtgccctaggattcttagctttgccaggaaatcctgaggctccagggaacatgggtttatttgatcaacagttggctcttcagtgggttcaaaaaaatatagcagcctttggtggaaatcctaaaagtgtaactctctttggagaaagtgcaggagcagcttcagttagcctgcatttgctttctcctggaagccattcattgttcaccagagccattctgcaaagtggttccgckaatgctccttgggcggtaacatctctttatgaagctaggaacagaacgttgaacttagctaaattgactggttgctctagagagaatgagactgaaataatcaagtgtcttagaaataaagatccccaagaaattcttctgaatgaagcatttgttgtcccctatgggactcctttgtcagtaaactttggtccgaccgtggatggtgattttctcactgacatgccagacatattacttgaacttggacaatttaaaaaaacccagattttggtgggtgttaataaagatgaagggacagcttttttagtcgcgggtgctcctggcttcagcaaagataacaatagtatcataactagaaaagaatttcaggaaggtttaaaaatattttttccaggagtgagtgagtttggaaaggaatccatcctttttcattacacagactgggtagatgatcagagacctgaaaactaccgtgaggccttgggtgatgttgttggggattataatttcatatgccctgccttggagttcaccaagaagttctcagaatggggaaataatgcctttttctactattttgaacaccgatcctccaaacttccgtggccagaatggatgggagtgatgcatggctatgaaattgaatttgtctttggtttacctctggaaagaagagataattacacaaaagccgaggaaattttgagtagatccatagtgaaacggtgggcaaattttgcaaaatatgggaatccaaatgagactcagaacaatagcacaagctggcctgtcttcaaaagcactgaacaaaaatatctaaccttgaatacagagtcaacaagaataatgacgaaactacgtgctcaacaatgtcgattctggacatcattttttccaaaagtcttggaaatgacaggaaatattgatgaagcagaatgggagtggaaagcaggattccatcgctggaacaattacatgatggactggaaaaatcaatttaacgattacactagcaagaaagaaagttgtgtgggtctc

SEQ ID NO: 96 - protein, 574 aa, Artificial
  Synthetic butyrylcholinesterase variant
  VARIANT (227)..(227): Xaa = Ala
  VARIANT (332)..(332): Y332A
EDDIIIATKNGKVRGMNLTVFGGTVTAFLGIPYAQPPLGRLRFKKPQSLTKWSDIWNATKYANSCCQNIDQSFPGFHGSEMWNPNTDLSEDCLYLNVWIPAPKPKNATVLIWIYGGGFQTGTSSLHVYDGKFLARVERVIVVSMNYRVGALGFLALPGNPEAPGNMGLFDQQLALQWVQKNIAAFGGNPKSVTLFGESAGAASVSLHLLSPGSHSLFTRAILQSGSXNAPWAVTSLYEARNRTLNLAKLTGCSRENETEIIKCLRNKDPQEILLNEAFVVPYGTPLSVNFGPTVDGDFLTDMPDILLELGQFKKTQILVGVNKDEGTAFLVAGAPGFSKDNNSIITRKEFQEGLKIFFPGVSEFGKESILFHYTDWVDDQRPENYREALGDVVGDYNFICPALEFTKKFSEWGNNAFFYYFEHRSSKLPWPEWMGVMHGYEIEFVFGLPLERRDNYTKAEEILSRSIVKRWANFAKYGNPNETQNNSTSWPVFKSTEQKYLTLNTESTRIMTKLRAQQCRFWTSFFPKVLEMTGNIDEAEWEWKAGFHRWNNYMMDWKNQFNDYTSKKESCVGL

SEQ ID NO: 97 - DNA, 1722 bp, Artificial
  Synthetic butyrylcholinesterase variant
gaagatgacatcataattgcaacaaagaatggaaaagtcagagggatgaacttgacagtttttggtggcacggtaacagcctttcttggaattccctatgcacagccacctcttggtagacttcgattcaaaaagccacagtctctgaccaagtggtctgatatttggaatgccacaaaatatgcaaattcttgctgtcagaacatagatcaaagttttccaggcttccatggatcagagatgtggaacccaaacactgacctcagtgaagactgtttatatctaaatgtatggattccagcacctaaaccaaaaaatgccactgtattgatatggatttatggtggtggttttcaaactggaacatcatctttacatgtttatgatggcaagtttctggctcgggttgaaagagttattgtagtgtcaatgaactatagggtgggtgccctaggattcttagctttgccaggaaatcctgaggctccagggaacatgggtttatttgatcaacagttggctcttcagtgggttcaaaaaaatatagcagcctttggtggaaatcctaaaagtgtaactctctttggagaaagtgcaggagcagcttcagttagcctgcatttgctttctcctggaagccattcattgttcaccagagccattctgcaaagtggttccgckaatgctccttgggcggtaacatctctttatgaagctaggaacagaacgttgaacttagctaaattgactggttgctctagagagaatgagactgaaataatcaagtgtcttagaaataaagatccccaagaaattcttctgaatgaagcatttgttgtcccctatgggactcctttgtcagtaaactttggtccgaccgtggatggtgattttctcactgacatgccagacatattacttgaacttggacaatttaaaaaaacccagattttggtgggtgttaataaagatgaagggacagcttttttagtcgggggtgctcctggcttcagcaaagataacaatagtatcataactagaaaagaatttcaggaaggtttaaaaatattttttccaggagtgagtgagtttggaaaggaatccatcctttttcattacacagactgggtagatgatcagagacctgaaaactaccgtgaggccttgggtgatgttgttggggattataatttcatatgccctgccttggagttcaccaagaagttctcagaatggggaaataatgcctttttctactattttgaacaccgatcctccaaacttccgtggccagaatggatgggagtgatgcatggctatgaaattgaatttgtctttggtttacctctggaaagaagagataattacacaaaagccgaggaaattttgagtagatccatagtgaaacggtgggcaaattttgcaaaatatgggaatccaaatgagactcagaacaatagcacaagctggcctgtcttcaaaagcactgaacaaaaatatctaaccttgaatacagagtcaacaagaataatgacgaaactacgtgctcaacaatgtcgattctggacatcattttttccaaaagtcttggaaatgacaggaaatattgatgaagcagaatgggagtggaaagcaggattccatcgctggaacaattacatgatggactggaaaaatcaatttaacgattacactagcaagaaagaaagttgtgtgggtctc

SEQ ID NO: 98 - protein, 574 aa, Artificial
  Synthetic butyrylcholinesterase variant
  VARIANT (227)..(227): Xaa = Ala
  VARIANT (332)..(332): Y332G
EDDIIIATKNGKVRGMNLTVFGGTVTAFLGIPYAQPPLGRLRFKKPQSLTKWSDIWNATKYANSCCQNIDQSFPGFHGSEMWNPNTDLSEDCLYLNVWIPAPKPKNATVLIWIYGGGFQTGTSSLHVYDGKFLARVERVIVVSMNYRVGALGFLALPGNPEAPGNMGLFDQQLALQWVQKNIAAFGGNPKSVTLFGESAGAASVSLHLLSPGSHSLFTRAILQSGSXNAPWAVTSLYEARNRTLNLAKLTGCSRENETEIIKCLRNKDPQEILLNEAFVVPYGTPLSVNFGPTVDGDFLTDMPDILLELGQFKKTQILVGVNKDEGTAFLVGGAPGFSKDNNSIITRKEFQEGLKIFFPGVSEFGKESILFHYTDWVDDQRPENYREALGDVVGDYNFICPALEFTKKFSEWGNNAFFYYFEHRSSKLPWPEWMGVMHGYEIEFVFGLPLERRDNYTKAEEILSRSIVKRWANFAKYGNPNETQNNSTSWPVFKSTEQKYLTLNTESTRIMTKLRAQQCRFWTSFFPKVLEMTGNIDEAEWEWKAGFHRWNNYMMDWKNQFNDYTSKKESCVGL

SEQ ID NO: 99 - DNA, 1722 bp, Artificial
  Synthetic butyrylcholinesterase variant
gaagatgacatcataattgcaacaaagaatggaaaagtcagagggatgaacttgacagtttttggtggcacggtaacagcctttcttggaattccctatgcacagccacctcttggtagacttcgattcaaaaagccacagtctctgaccaagtggtctgatatttggaatgccacaaaatatgcaaattcttgctgtcagaacatagatcaaagttttccaggcttccatggatcagagatgtggaacccaaacactgacctcagtgaagactgtttatatctaaatgtatggattccagcacctaaaccaaaaaatgccactgtattgatatggatttatggtggtggttttcaaactggaacatcatctttacatgtttatgatggcaagtttctggctcgggttgaaagagttattgtagtgtcaatgaactatagggtgggtgccctaggattcttagctttgccaggaaatcctgaggctccagggaacatgggtttatttgatcaacagttggctcttcagtgggttcaaaaaaatatagcagcctttggtggaaatcctaaaagtgtaactctctttggagaaagtgcaggagcagcttcagttagcctgcatttgctttctcctggaagccattcattgttcaccagagccattctgcaaagtggttccgckaatgctccttgggcggtaacatctctttatgaagctaggaacagaacgttgaacttagctaaattgactggttgctctagagagaatgagactgaaataatcaagtgtcttagaaataaagatccccaagaaattcttctgaatgaagcatttgttgtcccctatgggactcctttgtcagtaaactttggtccgaccgtggatggtgattttctcactgacatgccagacatattacttgaacttggacaatttaaaaaaacccagattttggtgggtgttaataaagatgaagggacagcttttttagtcttgggtgctcctggcttcagcaaagataacaatagtatcataactagaaaagaatttcaggaaggtttaaaaatattttttccaggagtgagtgagtttggaaaggaatccatcctttttcattacacagactgggtagatgatcagagacctgaaaactaccgtgaggccttgggtgatgttgttggggattataatttcatatgccctgccttggagttcaccaagaagttctcagaatggggaaataatgcctttttctactattttgaacaccgatcctccaaacttccgtggccagaatggatgggagtgatgcatggctatgaaattgaatttgtctttggtttacctctggaaagaagagataattacacaaaagccgaggaaattttgagtagatccatagtgaaacggtgggcaaattttgcaaaatatgggaatccaaatgagactcagaacaatagcacaagctggcctgtcttcaaaagcactgaacaaaaatatctaaccttgaatacagagtcaacaagaataatgacgaaactacgtgctcaacaatgtcgattctggacatcattttttccaaaagtcttggaaatgacaggaaatattgatgaagcagaatgggagtggaaagcaggattccatcgctggaacaattacatgatggactggaaaaatcaatttaacgattacactagcaagaaagaaagttgtgtgggtctc

SEQ ID NO: 100 - protein, 574 aa, Artificial
  Synthetic butyrylcholinesterase variant
  VARIANT (227)..(227): Xaa = Ala
  VARIANT (332)..(332): Y332L
EDDIIIATKNGKVRGMNLTVFGGTVTAFLGIPYAQPPLGRLRFKKPQSLTKWSDIWNATKYANSCCQNIDQSFPGFHGSEMWNPNTDLSEDCLYLNVWIPAPKPKNATVLIWIYGGGFQTGTSSLHVYDGKFLARVERVIVVSMNYRVGALGFLALPGNPEAPGNMGLFDQQLALQWVQKNIAAFGGNPKSVTLFGESAGAASVSLHLLSPGSHSLFTRAILQSGSXNAPWAVTSLYEARNRTLNLAKLTGCSRENETEIIKCLRNKDPQEILLNEAFVVPYGTPLSVNFGPTVDGDFLTDMPDILLELGQFKKTQILVGVNKDEGTAFLVLGAPGFSKDNNSIITRKEFQEGLKIFFPGVSEFGKESILFHYTDWVDDQRPENYREALGDVVGDYNFICPALEFTKKFSEWGNNAFFYYFEHRSSKLPWPEWMGVMHGYEIEFVFGLPLERRDNYTKAEEILSRSIVKRWANFAKYGNPNETQNNSTSWPVFKSTEQKYLTLNTESTRIMTKLRAQQCRFWTSFFPKVLEMTGNIDEAEWEWKAGFHRWNNYMMDWKNQFNDYTSKKESCVGL

SEQ ID NO: 101 - DNA, 1722 bp, Artificial
  Synthetic butyrylcholinesterase variant
gaagatgacatcataattgcaacaaagaatggaaaagtcagagggatgaacttgacagtttttggtggcacggtaacagcctttcttggaattccctatgcacagccacctcttggtagacttcgattcaaaaagccacagtctctgaccaagtggtctgatatttggaatgccacaaaatatgcaaattcttgctgtcagaacatagatcaaagttttccaggcttccatggatcagagatgtggaacccaaacactgacctcagtgaagactgtttatatctaaatgtatggattccagcacctaaaccaaaaaatgccactgtattgatatggatttatggtggtggttttcaaactggaacatcatctttacatgtttatgatggcaagtttctggctcgggttgaaagagttattgtagtgtcaatgaactatagggtgggtgccctaggattcttagctttgccaggaaatcctgaggctccagggaacatgggtttatttgatcaacagttggctcttcagtgggttcaaaaaaatatagcagcctttggtggaaatcctaaaagtgtaactctctttggagaaagtgcaggagcagcttcagttagcctgcatttgctttctcctggaagccattcattgttcaccagagccattctgcaaagtggttccgckaatgctccttgggcggtaacatctctttatgaagctaggaacagaacgttgaacttagctaaattgactggttgctctagagagaatgagactgaaataatcaagtgtcttagaaataaagatccccaagaaattcttctgaatgaagcatttgttgtcccctatgggactcctttgtcagtaaactttggtccgaccgtggatggtgattttctcactgacatgccagacatattacttgaacttggacaatttaaaaaaacccagattttggtgggtgttaataaagatgaagggacagcttttttagtctctggtgctcctggcttcagcaaagataacaatagtatcataactagaaaagaatttcaggaaggtttaaaaatattttttccaggagtgagtgagtttggaaaggaatccatcctttttcattacacagactgggtagatgatcagagacctgaaaactaccgtgaggccttgggtgatgttgttggggattataatttcatatgccctgccttggagttcaccaagaagttctcagaatggggaaataatgcctttttctactattttgaacaccgatcctccaaacttccgtggccagaatggatgggagtgatgcatggctatgaaattgaatttgtctttggtttacctctggaaagaagagataattacacaaaagccgaggaaattttgagtagatccatagtgaaacggtgggcaaattttgcaaaatatgggaatccaaatgagactcagaacaatagcacaagctggcctgtcttcaaaagcactgaacaaaaatatctaaccttgaatacagagtcaacaagaataatgacgaaactacgtgctcaacaatgtcgattctggacatcattttttccaaaagtcttggaaatgacaggaaatattgatgaagcagaatgggagtggaaagcaggattccatcgctggaacaattacatgatggactggaaaaatcaatttaacgattacactagcaagaaagaaagttgtgtgggtctc

SEQ ID NO: 102 - protein, 574 aa, Artificial
  Synthetic butyrylcholinesterase variant
  VARIANT (227)..(227): Xaa = Ala
  VARIANT (332)..(332): Y332S
EDDIIIATKNGKVRGMNLTVFGGTVTAFLGIPYAQPPLGRLRFKKPQSLTKWSDIWNATKYANSCCQNIDQSFPGFHGSEMWNPNTDLSEDCLYLNVWIPAPKPKNATVLIWIYGGGFQTGTSSLHVYDGKFLARVERVIVVSMNYRVGALGFLALPGNPEAPGNMGLFDQQLALQWVQKNIAAFGGNPKSVTLFGESAGAASVSLHLLSPGSHSLFTRAILQSGSXNAPWAVTSLYEARNRTLNLAKLTGCSRENETEIIKCLRNKDPQEILLNEAFVVPYGTPLSVNFGPTVDGDFLTDMPDILLELGQFKKTQILVGVNKDEGTAFLVSGAPGFSKDNNSIITRKEFQEGLKIFFPGVSEFGKESILFHYTDWVDDQRPENYREALGDVVGDYNFICPALEFTKKFSEWGNNAFFYYFEHRSSKLPWPEWMGVMHGYEIEFVFGLPLERRDNYTKAEEILSRSIVKRWANFAKYGNPNETQNNSTSWPVFKSTEQKYLTLNTESTRIMTKLRAQQCRFWTSFFPKVLEMTGNIDEAEWEWKAGFHRWNNYMMDWKNQFNDYTSKKESCVGL

SEQ ID NO: 103 - DNA, 1722 bp, Artificial
  Synthetic butyrylcholinesterase variant
gaagatgacatcataattgcaacaaagaatggaaaagtcagagggatgaacttgacagtttttggtggcacggtaacagcctttcttggaattccctatgcacagccacctcttggtagacttcgattcaaaaagccacagtctctgaccaagtggtctgatatttggaatgccacaaaatatgcaaattcttgctgtcagaacatagatcaaagttttccaggcttccatggatcagagatgtggaacccaaacactgacctcagtgaagactgtttatatctaaatgtatggattccagcacctaaaccaaaaaatgccactgtattgatatggatttatggtggtggttttcaaactggaacatcatctttacatgtttatgatggcaagtttctggctcgggttgaaagagttattgtagtgtcaatgaactatagggtgggtgccctaggattcttagctttgccaggaaatcctgaggctccagggaacatgggtttatttgatcaacagttggctcttcagtgggttcaaaaaaatatagcagcctttggtggaaatcctaaaagtgtaactctctttggagaaagtgcaggagcagcttcagttagcctgcatttgctttctcctggaagccattcattgttcaccagagccattctgcaaagtggttccgckaatgctccttgggcggtaacatctctttatgaagctaggaacagaacgttgaacttagctaaattgactggttgctctagagagaatgagactgaaataatcaagtgtcttagaaataaagatccccaagaaattcttctgaatgaagcatttgttgtcccctatgggactcctttgtcagtaaactttggtccgaccgtggatggtgattttctcactgacatgccagacatattacttgaacttggacaatttaaaaaaacccagattttggtgggtgttaataaagatgaagggacagcttttttagtctggggtgctcctggcttcagcaaagataacaatagtatcataactagaaaagaatttcaggaaggtttaaaaatattttttccaggagtgagtgagtttggaaaggaatccatcctttttcattacacagactgggtagatgatcagagacctgaaaactaccgtgaggccttgggtgatgttgttggggattataatttcatatgccctgccttggagttcaccaagaagttctcagaatggggaaataatgcctttttctactattttgaacaccgatcctccaaacttccgtggccagaatggatgggagtgatgcatggctatgaaattgaatttgtctttggtttacctctggaaagaagagataattacacaaaagccgaggaaattttgagtagatccatagtgaaacggtgggcaaattttgcaaaatatgggaatccaaatgagactcagaacaatagcacaagctggcctgtcttcaaaagcactgaacaaaaatatctaaccttgaatacagagtcaacaagaataatgacgaaactacgtgctcaacaatgtcgattctggacatcattttttccaaaagtcttggaaatgacaggaaatattgatgaagcagaatgggagtggaaagcaggattccatcgctggaacaattacatgatggactggaaaaatcaatttaacgattacactagcaagaaagaaagttgtgtgggtctc

SEQ ID NO: 104 - protein, 574 aa, Artificial
  Synthetic butyrylcholinesterase variant
  VARIANT (227)..(227): Xaa = Ala
  VARIANT (332)..(332): Y332W
EDDIIIATKNGKVRGMNLTVFGGTVTAFLGIPYAQPPLGRLRFKKPQSLTKWSDIWNATKYANSCCQNIDQSFPGFHGSEMWNPNTDLSEDCLYLNVWIPAPKPKNATVLIWIYGGGFQTGTSSLHVYDGKFLARVERVIVVSMNYRVGALGFLALPGNPEAPGNMGLFDQQLALQWVQKNIAAFGGNPKSVTLFGESAGAASVSLHLLSPGSHSLFTRAILQSGSXNAPWAVTSLYEARNRTLNLAKLTGCSRENETEIIKCLRNKDPQEILLNEAFVVPYGTPLSVNFGPTVDGDFLTDMPDILLELGQFKKTQILVGVNKDEGTAFLVWGAPGFSKDNNSIITRKEFQEGLKIFFPGVSEFGKESILFHYTDWVDDQRPENYREALGDVVGDYNFICPALEFTKKFSEWGNNAFFYYFEHRSSKLPWPEWMGVMHGYEIEFVFGLPLERRDNYTKAEEILSRSIVKRWANFAKYGNPNETQNNSTSWPVFKSTEQKYLTLNTESTRIMTKLRAQQCRFWTSFFPKVLEMTGNIDEAEWEWKAGFHRWNNYMMDWKNQFNDYTSKKESCVGL

SEQ ID NO: 105 - DNA, 1722 bp, Artificial
  Synthetic butyrylcholinesterase variant
gaagatgacatcataattgcaacaaagaatggaaaagtcagagggatgaacttgacagtttttggtggcacggtaacagcctttcttggaattccctatgcacagccacctcttggtagacttcgattcaaaaagccacagtctctgaccaagtggtctgatatttggaatgccacaaaatatgcaaattcttgctgtcagaacatagatcaaagttttccaggcttccatggatcagagatgtggaacccaaacactgacctcagtgaagactgtttatatctaaatgtatggattccagcacctaaaccaaaaaatgccactgtattgatatggatttatggtggtggttttcaaactggaacatcatctttacatgtttatgatggcaagtttctggctcgggttgaaagagttattgtagtgtcaatgaactatagggtgggtgccctaggattcttagctttgccaggaaatcctgaggctccagggaacatgggtttatttgatcaacagttggctcttcagtgggttcaaaaaaatatagcagcctttggtggaaatcctaaaagtgtaactctctttggagaaagtgcaggagcagcttcagttagcctgcatttgctttctcctggaagccattcattgttcaccagagccattctgcaaagtggttccgckaatgctccttgggcggtaacatctctttatgaagctaggaacagaacgttgaacttagctaaattgactggttgctctagagagaatgagactgaaataatcaagtgtcttagaaataaagatccccaagaaattcttctgaatgaagcatttgttgtcccctatgggactcctttgtcagtaaactttggtccgaccgtggatggtgattttctcactgacatgccagacatattacttgaacttggacaatttaaaaaaacccagattttggtgggtgttaataaagatgaagggacagcttttttagtctatggtgctcctggcttcagcaaagataacaatagtatcataactagaaaagaatttcaggaaggtttaaaaatattttttccaggagtgagtgagtttggaaaggaatccatcctttttcattacacagactgggtagatgatcagagacctgaaaactaccgtgaggccttgggtgatgttgttggggattataatttcatatgccctgccttggagttcaccaagaagttctcagaatggggaaataatgcctttttctactattttgaacaccgatcctccaaacttaagtggccagaatggatgggagtgatgcatggctatgaaattgaatttgtctttggtttacctctggaaagaagagataattacacaaaagccgaggaaattttgagtagatccatagtgaaacggtgggcaaattttgcaaaatatgggaatccaaatgagactcagaacaatagcacaagctggcctgtcttcaaaagcactgaacaaaaatatctaaccttgaatacagagtcaacaagaataatgacgaaactacgtgctcaacaatgtcgattctggacatcattttttccaaaagtcttggaaatgacaggaaatattgatgaagcagaatgggagtggaaagcaggattccatcgctggaacaattacatgatggactggaaaaatcaatttaacgattacactagcaagaaagaaagttgtgtgggtctc

SEQ ID NO: 106 - protein, 574 aa, Artificial
  Synthetic butyrylcholinesterase variant
  VARIANT (227)..(227): Xaa = Ala
  VARIANT (429)..(429): P429K
EDDIIIATKNGKVRGMNLTVFGGTVTAFLGIPYAQPPLGRLRFKKPQSLTKWSDIWNATKYANSCCQNIDQSFPGFHGSEMWNPNTDLSEDCLYLNVWIPAPKPKNATVLIWIYGGGFQTGTSSLHVYDGKFLARVERVIVVSMNYRVGALGFLALPGNPEAPGNMGLFDQQLALQWVQKNIAAFGGNPKSVTLFGESAGAASVSLHLLSPGSHSLFTRAILQSGSXNAPWAVTSLYEARNRTLNLAKLTGCSRENETEIIKCLRNKDPQEILLNEAFVVPYGTPLSVNFGPTVDGDFLTDMPDILLELGQFKKTQILVGVNKDEGTAFLVYGAPGFSKDNNSIITRKEFQEGLKIFFPGVSEFGKESILFHYTDWVDDQRPENYREALGDVVGDYNFICPALEFTKKFSEWGNNAFFYYFEHRSSKLKWPEWMGVMHGYEIEFVFGLPLERRDNYTKAEEILSRSIVKRWANFAKYGNPNETQNNSTSWPVFKSTEQKYLTLNTESTRIMTKLRAQQCRFWTSFFPKVLEMTGNIDEAEWEWKAGFHRWNNYMMDWKNQFNDYTSKKESCVGL

SEQ ID NO: 107 - DNA, 1722 bp, Artificial
  Synthetic butyrylcholinesterase variant
gaagatgacatcataattgcaacaaagaatggaaaagtcagagggatgaacttgacagtttttggtggcacggtaacagcctttcttggaattccctatgcacagccacctcttggtagacttcgattcaaaaagccacagtctctgaccaagtggtctgatatttggaatgccacaaaatatgcaaattcttgctgtcagaacatagatcaaagttttccaggcttccatggatcagagatgtggaacccaaacactgacctcagtgaagactgtttatatctaaatgtatggattccagcacctaaaccaaaaaatgccactgtattgatatggatttatggtggtggttttcaaactggaacatcatctttacatgtttatgatggcaagtttctggctcgggttgaaagagttattgtagtgtcaatgaactatagggtgggtgccctaggattcttagctttgccaggaaatcctgaggctccagggaacatgggtttatttgatcaacagttggctcttcagtgggttcaaaaaaatatagcagcctttggtggaaatcctaaaagtgtaactctctttggagaaagtgcaggagcagcttcagttagcctgcatttgctttctcctggaagccattcattgttcaccagagccattctgcaaagtggttccgckaatgctccttgggcggtaacatctctttatgaagctaggaacagaacgttgaacttagctaaattgactggttgctctagagagaatgagactgaaataatcaagtgtcttagaaataaagatccccaagaaattcttctgaatgaagcatttgttgtcccctatgggactcctttgtcagtaaactttggtccgaccgtggatggtgattttctcactgacatgccagacatattacttgaacttggacaatttaaaaaaacccagattttggtgggtgttaataaagatgaagggacagcttttttagtctatggtgctcctggcttcagcaaagataacaatagtatcataactagaaaagaatttcaggaaggtttaaaaatattttttccaggagtgagtgagtttggaaaggaatccatcctttttcattacacagactgggtagatgatcagagacctgaaaactaccgtgaggccttgggtgatgttgttggggattataatttcatatgccctgccttggagttcaccaagaagttctcagaatggggaaataatgcctttttctactattttgaacaccgatcctccaaacttttgtggccagaatggatgggagtgatgcatggctatgaaattgaatttgtctttggtttacctctggaaagaagagataattacacaaaagccgaggaaattttgagtagatccatagtgaaacggtgggcaaattttgcaaaatatgggaatccaaatgagactcagaacaatagcacaagctggcctgtcttcaaaagcactgaacaaaaatatctaaccttgaatacagagtcaacaagaataatgacgaaactacgtgctcaacaatgtcgattctggacatcattttttccaaaagtcttggaaatgacaggaaatattgatgaagcagaatgggagtggaaagcaggattccatcgctggaacaattacatgatggactggaaaaatcaatttaacgattacactagcaagaaagaaagttgtgtgggtctc

SEQ ID NO: 108 - protein, 574 aa, Artificial
  Synthetic butyrylcholinesterase variant
  VARIANT (227)..(227): Xaa = Ala
  VARIANT (429)..(429): P429L
EDDIIIATKNGKVRGMNLTVFGGTVTAFLGIPYAQPPLGRLRFKKPQSLTKWSDIWNATKYANSCCQNIDQSFPGFHGSEMWNPNTDLSEDCLYLNVWIPAPKPKNATVLIWIYGGGFQTGTSSLHVYDGKFLARVERVIVVSMNYRVGALGFLALPGNPEAPGNMGLFDQQLALQWVQKNIAAFGGNPKSVTLFGESAGAASVSLHLLSPGSHSLFTRAILQSGSXNAPWAVTSLYEARNRTLNLAKLTGCSRENETEIIKCLRNKDPQEILLNEAFVVPYGTPLSVNFGPTVDGDFLTDMPDILLELGQFKKTQILVGVNKDEGTAFLVYGAPGFSKDNNSIITRKEFQEGLKIFFPGVSEFGKESILFHYTDWVDDQRPENYREALGDVVGDYNFICPALEFTKKFSEWGNNAFFYYFEHRSSKLLWPEWMGVMHGYEIEFVFGLPLERRDNYTKAEEILSRSIVKRWANFAKYGNPNETQNNSTSWPVFKSTEQKYLTLNTESTRIMTKLRAQQCRFWTSFFPKVLEMTGNIDEAEWEWKAGFHRWNNYMMDWKNQFNDYTSKKESCVGL

SEQ ID NO: 109 - DNA, 1722 bp, Artificial
  Synthetic butyrylcholinesterase variant
gaagatgacatcataattgcaacaaagaatggaaaagtcagagggatgaacttgacagtttttggtggcacggtaacagcctttcttggaattccctatgcacagccacctcttggtagacttcgattcaaaaagccacagtctctgaccaagtggtctgatatttggaatgccacaaaatatgcaaattcttgctgtcagaacatagatcaaagttttccaggcttccatggatcagagatgtggaacccaaacactgacctcagtgaagactgtttatatctaaatgtatggattccagcacctaaaccaaaaaatgccactgtattgatatggatttatggtggtggttttcaaactggaacatcatctttacatgtttatgatggcaagtttctggctcgggttgaaagagttattgtagtgtcaatgaactatagggtgggtgccctaggattcttagctttgccaggaaatcctgaggctccagggaacatgggtttatttgatcaacagttggctcttcagtgggttcaaaaaaatatagcagcctttggtggaaatcctaaaagtgtaactctctttggagaaagtgcaggagcagcttcagttagcctgcatttgctttctcctggaagccattcattgttcaccagagccattctgcaaagtggttccgckaatgctccttgggcggtaacatctctttatgaagctaggaacagaacgttgaacttagctaaattgactggttgctctagagagaatgagactgaaataatcaagtgtcttagaaataaagatccccaagaaattcttctgaatgaagcatttgttgtcccctatgggactcctttgtcagtaaactttggtccgaccgtggatggtgattttctcactgacatgccagacatattacttgaacttggacaatttaaaaaaacccagattttggtgggtgttaataaagatgaagggacagcttttttagtctatggtgctcctggcttcagcaaagataacaatagtatcataactagaaaagaatttcaggaaggtttaaaaatattttttccaggagtgagtgagtttggaaaggaatccatcctttttcattacacagactgggtagatgatcagagacctgaaaactaccgtgaggccttgggtgatgttgttggggattataatttcatatgccctgccttggagttcaccaagaagttctcagaatggggaaataatgcctttttctactattttgaacaccgatcctccaaacttcagtggccagaatggatgggagtgatgcatggctatgaaattgaatttgtctttggtttacctctggaaagaagagataattacacaaaagccgaggaaattttgagtagatccatagtgaaacggtgggcaaattttgcaaaatatgggaatccaaatgagactcagaacaatagcacaagctggcctgtcttcaaaagcactgaacaaaaatatctaaccttgaatacagagtcaacaagaataatgacgaaactacgtgctcaacaatgtcgattctggacatcattttttccaaaagtcttggaaatgacaggaaatattgatgaagcagaatgggagtggaaagcaggattccatcgctggaacaattacatgatggactggaaaaatcaatttaacgattacactagcaagaaagaaagttgtgtgggtctc

SEQ ID NO: 110 - protein, 574 aa, Artificial
  Synthetic butyrylcholinesterase variant
  VARIANT (227)..(227): Xaa = Ala
  VARIANT (429)..(429): P429Q
EDDIIIATKNGKVRGMNLTVFGGTVTAFLGIPYAQPPLGRLRFKKPQSLTKWSDIWNATKYANSCCQNIDQSFPGFHGSEMWNPNTDLSEDCLYLNVWIPAPKPKNATVLIWIYGGGFQTGTSSLHVYDGKFLARVERVIVVSMNYRVGALGFLALPGNPEAPGNMGLFDQQLALQWVQKNIAAFGGNPKSVTLFGESAGAASVSLHLLSPGSHSLFTRAILQSGSXNAPWAVTSLYEARNRTLNLAKLTGCSRENETEIIKCLRNKDPQEILLNEAFVVPYGTPLSVNFGPTVDGDFLTDMPDILLELGQFKKTQILVGVNKDEGTAFLVYGAPGFSKDNNSIITRKEFQEGLKIFFPGVSEFGKESILFHYTDWVDDQRPENYREALGDVVGDYNFICPALEFTKKFSEWGNNAFFYYFEHRSSKLQWPEWMGVMHGYEIEFVFGLPLERRDNYTKAEEILSRSIVKRWANFAKYGNPNETQNNSTSWPVFKSTEQKYLTLNTESTRIMTKLRAQQCRFWTSFFPKVLEMTGNIDEAEWEWKAGFHRWNNYMMDWKNQFNDYTSKKESCVGL

SEQ ID NO: 111 - DNA, 1722 bp, Artificial
  Synthetic butyrylcholinesterase variant
gaagatgacatcataattgcaacaaagaatggaaaagtcagagggatgaacttgacagtttttggtggcacggtaacagcctttcttggaattccctatgcacagccacctcttggtagacttcgattcaaaaagccacagtctctgaccaagtggtctgatatttggaatgccacaaaatatgcaaattcttgctgtcagaacatagatcaaagttttccaggcttccatggatcagagatgtggaacccaaacactgacctcagtgaagactgtttatatctaaatgtatggattccagcacctaaaccaaaaaatgccactgtattgatatggatttatggtggtggttttcaaactggaacatcatctttacatgtttatgatggcaagtttctggctcgggttgaaagagttattgtagtgtcaatgaactatagggtgggtgccctaggattcttagctttgccaggaaatcctgaggctccagggaacatgggtttatttgatcaacagttggctcttcagtgggttcaaaaaaatatagcagcctttggtggaaatcctaaaagtgtaactctctttggagaaagtgcaggagcagcttcagttagcctgcatttgctttctcctggaagccattcattgttcaccagagccattctgcaaagtggttccgckaatgctccttgggcggtaacatctctttatgaagctaggaacagaacgttgaacttagctaaattgactggttgctctagagagaatgagactgaaataatcaagtgtcttagaaataaagatccccaagaaattcttctgaatgaagcatttgttgtcccctatgggactcctttgtcagtaaactttggtccgaccgtggatggtgattttctcactgacatgccagacatattacttgaacttggacaatttaaaaaaacccagattttggtgggtgttaataaagatgaagggacagcttttttagtctatggtgctcctggcttcagcaaagataacaatagtatcataactagaaaagaatttcaggaaggtttaaaaatattttttccaggagtgagtgagtttggaaaggaatccatcctttttcattacacagactgggtagatgatcagagacctgaaaactaccgtgaggccttgggtgatgttgttggggattataatttcatatgccctgccttggagttcaccaagaagttctcagaatggggaaataatgcctttttctactattttgaacaccgatcctccaaacttaggtggccagaatggatgggagtgatgcatggctatgaaattgaatttgtctttggtttacctctggaaagaagagataattacacaaaagccgaggaaattttgagtagatccatagtgaaacggtgggcaaattttgcaaaatatgggaatccaaatgagactcagaacaatagcacaagctggcctgtcttcaaaagcactgaacaaaaatatctaaccttgaatacagagtcaacaagaataatgacgaaactacgtgctcaacaatgtcgattctggacatcattttttccaaaagtcttggaaatgacaggaaatattgatgaagcagaatgggagtggaaagcaggattccatcgctggaacaattacatgatggactggaaaaatcaatttaacgattacactagcaagaaagaaagttgtgtgggtctc

SEQ ID NO: 112 - protein, 574 aa, Artificial
  Synthetic butyrylcholinesterase variant
  VARIANT (227)..(227): Xaa = Ala
  VARIANT (429)..(429): P429R
EDDIIIATKNGKVRGMNLTVFGGTVTAFLGIPYAQPPLGRLRFKKPQSLTKWSDIWNATKYANSCCQNIDQSFPGFHGSEMWNPNTDLSEDCLYLNVWIPAPKPKNATVLIWIYGGGFQTGTSSLHVYDGKFLARVERVIVVSMNYRVGALGFLALPGNPEAPGNMGLFDQQLALQWVQKNIAAFGGNPKSVTLFGESAGAASVSLHLLSPGSHSLFTRAILQSGSXNAPWAVTSLYEARNRTLNLAKLTGCSRENETEIIKCLRNKDPQEILLNEAFVVPYGTPLSVNFGPTVDGDFLTDMPDILLELGQFKKTQILVGVNKDEGTAFLVYGAPGFSKDNNSIITRKEFQEGLKIFFPGVSEFGKESILFHYTDWVDDQRPENYREALGDVVGDYNFICPALEFTKKFSEWGNNAFFYYFEHRSSKLRWPEWMGVMHGYEIEFVFGLPLERRDNYTKAEEILSRSIVKRWANFAKYGNPNETQNNSTSWPVFKSTEQKYLTLNTESTRIMTKLRAQQCRFWTSFFPKVLEMTGNIDEAEWEWKAGFHRWNNYMMDWKNQFNDYTSKKESCVGL

SEQ ID NO: 113 - DNA, 1722 bp, Artificial
  Synthetic butyrylcholinesterase variant
gaagatgacatcataattgcaacaaagaatggaaaagtcagagggatgaacttgacagtttttggtggcacggtaacagcctttcttggaattccctatgcacagccacctcttggtagacttcgattcaaaaagccacagtctctgaccaagtggtctgatatttggaatgccacaaaatatgcaaattcttgctgtcagaacatagatcaaagttttccaggcttccatggatcagagatgtggaacccaaacactgacctcagtgaagactgtttatatctaaatgtatggattccagcacctaaaccaaaaaatgccactgtattgatatggatttatggtggtggttttcaaactggaacatcatctttacatgtttatgatggcaagtttctggctcgggttgaaagagttattgtagtgtcaatgaactatagggtgggtgccctaggattcttagctttgccaggaaatcctgaggctccagggaacatgggtttatttgatcaacagttggctcttcagtgggttcaaaaaaatatagcagcctttggtggaaatcctaaaagtgtaactctctttggagaaagtgcaggagcagcttcagttagcctgcatttgctttctcctggaagccattcattgttcaccagagccattctgcaaagtggttccgckaatgctccttgggcggtaacatctctttatgaagctaggaacagaacgttgaacttagctaaattgactggttgctctagagagaatgagactgaaataatcaagtgtcttagaaataaagatccccaagaaattcttctgaatgaagcatttgttgtcccctatgggactcctttgtcagtaaactttggtccgaccgtggatggtgattttctcactgacatgccagacatattacttgaacttggacaatttaaaaaaacccagattttggtgggtgttaataaagatgaagggacagcttttttagtctatggtgctcctggcttcagcaaagataacaatagtatcataactagaaaagaatttcaggaaggtttaaaaatattttttccaggagtgagtgagtttggaaaggaatccatcctttttcattacacagactgggtagatgatcagagacctgaaaactaccgtgaggccttgggtgatgttgttggggattataatttcatatgccctgccttggagttcaccaagaagttctcagaatggggaaataatgcctttttctactattttgaacaccgatcctccaaactttcgtggccagaatggatgggagtgatgcatggctatgaaattgaatttgtctttggtttacctctggaaagaagagataattacacaaaagccgaggaaattttgagtagatccatagtgaaacggtgggcaaattttgcaaaatatgggaatccaaatgagactcagaacaatagcacaagctggcctgtcttcaaaagcactgaacaaaaatatctaaccttgaatacagagtcaacaagaataatgacgaaactacgtgctcaacaatgtcgattctggacatcattttttccaaaagtcttggaaatgacaggaaatattgatgaagcagaatgggagtggaaagcaggattccatcgctggaacaattacatgatggactggaaaaatcaatttaacgattacactagcaagaaagaaagttgtgtgggtctc

SEQ ID NO: 114 - protein, 574 aa, Artificial
  Synthetic butyrylcholinesterase variant
  VARIANT (227)..(227): Xaa = Ala
  VARIANT (429)..(429): P429S
EDDIIIATKNGKVRGMNLTVFGGTVTAFLGIPYAQPPLGRLRFKKPQSLTKWSDIWNATKYANSCCQNIDQSFPGFHGSEMWNPNTDLSEDCLYLNVWIPAPKPKNATVLIWIYGGGFQTGTSSLHVYDGKFLARVERVIVVSMNYRVGALGFLALPGNPEAPGNMGLFDQQLALQWVQKNIAAFGGNPKSVTLFGESAGAASVSLHLLSPGSHSLFTRAILQSGSXNAPWAVTSLYEARNRTLNLAKLTGCSRENETEIIKCLRNKDPQEILLNEAFVVPYGTPLSVNFGPTVDGDFLTDMPDILLELGQFKKTQILVGVNKDEGTAFLVYGAPGFSKDNNSIITRKEFQEGLKIFFPGVSEFGKESILFHYTDWVDDQRPENYREALGDVVGDYNFICPALEFTKKFSEWGNNAFFYYFEHRSSKLSWPEWMGVMHGYEIEFVFGLPLERRDNYTKAEEILSRSIVKRWANFAKYGNPNETQNNSTSWPVFKSTEQKYLTLNTESTRIMTKLRAQQCRFWTSFFPKVLEMTGNIDEAEWEWKAGFHRWNNYMMDWKNQFNDYTSKKESCVGL

SEQ ID NO: 115 - DNA, 1722 bp, Artificial
  Synthetic butyrylcholinesterase variant
gaagatgacatcataattgcaacaaagaatggaaaagtcagagggatgaacttgacagtttttggtggcacggtaacagcctttcttggaattccctatgcacagccacctcttggtagacttcgattcaaaaagccacagtctctgaccaagtggtctgatatttggaatgccacaaaatatgcaaattcttgctgtcagaacatagatcaaagttttccaggcttccatggatcagagatgtggaacccaaacactgacctcagtgaagactgtttatatctaaatgtatggattccagcacctaaaccaaaaaatgccactgtattgatatggatttatggtggtggttttcaaactggaacatcatctttacatgtttatgatggcaagtttctggctcgggttgaaagagttattgtagtgtcaatgaactatagggtgggtgccctaggattcttagctttgccaggaaatcctgaggctccagggaacatgggtttatttgatcaacagttggctcttcagtgggttcaaaaaaatatagcagcctttggtggaaatcctaaaagtgtaactctctttggagaaagtgcaggagcagcttcagttagcctgcatttgctttctcctggaagccattcattgttcaccagagccattctgcaaagtggttccgckaatgctccttgggcggtaacatctctttatgaagctaggaacagaacgttgaacttagctaaattgactggttgctctagagagaatgagactgaaataatcaagtgtcttagaaataaagatccccaagaaattcttctgaatgaagcatttgttgtcccctatgggactcctttgtcagtaaactttggtccgaccgtggatggtgattttctcactgacatgccagacatattacttgaacttggacaatttaaaaaaacccagattttggtgggtgttaataaagatgaagggacagcttttttagtctatggtgctcctggcttcagcaaagataacaatagtatcataactagaaaagaatttcaggaaggtttaaaaatattttttccaggagtgagtgagtttggaaaggaatccatcctttttcattacacagactgggtagatgatcagagacctgaaaactaccgtgaggccttgggtgatgttgttggggattataatttcatatgccctgccttggagttcaccaagaagttctcagaatggggaaataatgcctttttctactattttgaacaccgatcctccaaacttacgtggccagaatggatgggagtgatgcatggctatgaaattgaatttgtctttggtttacctctggaaagaagagataattacacaaaagccgaggaaattttgagtagatccatagtgaaacggtgggcaaattttgcaaaatatgggaatccaaatgagactcagaacaatagcacaagctggcctgtcttcaaaagcactgaacaaaaatatctaaccttgaatacagagtcaacaagaataatgacgaaactacgtgctcaacaatgtcgattctggacatcattttttccaaaagtcttggaaatgacaggaaatattgatgaagcagaatgggagtggaaagcaggattccatcgctggaacaattacatgatggactggaaaaatcaatttaacgattacactagcaagaaagaaagttgtgtgggtctc

SEQ ID NO: 116 - protein, 574 aa, Artificial
  Synthetic butyrylcholinesterase variant
  VARIANT (227)..(227): Xaa = Ala
  VARIANT (429)..(429): P429T
EDDIIIATKNGKVRGMNLTVFGGTVTAFLGIPYAQPPLGRLRFKKPQSLTKWSDIWNATKYANSCCQNIDQSFPGFHGSEMWNPNTDLSEDCLYLNVWIPAPKPKNATVLIWIYGGGFQTGTSSLHVYDGKFLARVERVIVVSMNYRVGALGFLALPGNPEAPGNMGLFDQQLALQWVQKNIAAFGGNPKSVTLFGESAGAASVSLHLLSPGSHSLFTRAILQSGSXNAPWAVTSLYEARNRTLNLAKLTGCSRENETEIIKCLRNKDPQEILLNEAFVVPYGTPLSVNFGPTVDGDFLTDMPDILLELGQFKKTQILVGVNKDEGTAFLVYGAPGFSKDNNSIITRKEFQEGLKIFFPGVSEFGKESILFHYTDWVDDQRPENYREALGDVVGDYNFICPALEFTKKFSEWGNNAFFYYFEHRSSKLTWPEWMGVMHGYEIEFVFGLPLERRDNYTKAEEILSRSIVKRWANFAKYGNPNETQNNSTSWPVFKSTEQKYLTLNTESTRIMTKLRAQQCRFWTSFFPKVLEMTGNIDEAEWEWKAGFHRWNNYMMDWKNQFNDYTSKKESCVGL

SEQ ID NO: 117 - DNA, 1722 bp, Artificial
  Synthetic butyrylcholinesterase variant
gaagatgacatcataattgcaacaaagaatggaaaagtcagagggatgaacttgacagtttttggtggcacggtaacagcctttcttggaattccctatgcacagccacctcttggtagacttcgattcaaaaagccacagtctctgaccaagtggtctgatatttggaatgccacaaaatatgcaaattcttgctgtcagaacatagatcaaagttttccaggcttccatggatcagagatgtggaacccaaacactgacctcagtgaagactgtttatatctaaatgtatggattccagcacctaaaccaaaaaatgccactgtattgatatggatttatggtggtggttttcaaactggaacatcatctttacatgtttatgatggcaagtttctggctcgggttgaaagagttattgtagtgtcaatgaactatagggtgggtgccctaggattcttagctttgccaggaaatcctgaggctccagggaacatgggtttatttgatcaacagttggctcttcagtgggttcaaaaaaatatagcagcctttggtggaaatcctaaaagtgtaactctctttggagaaagtgcaggagcagcttcagttagcctgcatttgctttctcctggaagccattcattgttcaccagagccattctgcaaagtggttccgckaatgctccttgggcggtaacatctctttatgaagctaggaacagaacgttgaacttagctaaattgactggttgctctagagagaatgagactgaaataatcaagtgtcttagaaataaagatccccaagaaattcttctgaatgaagcatttgttgtcccctatgggactcctttgtcagtaaactttggtccgaccgtggatggtgattttctcactgacatgccagacatattacttgaacttggacaatttaaaaaaacccagattttggtgggtgttaataaagatgaagggacagcttttttagtctatggtgctcctggcttcagcaaagataacaatagtatcataactagaaaagaatttcaggaaggtttaaaaatattttttccaggagtgagtgagtttggaaaggaatccatcctttttcattacacagactgggtagatgatcagagacctgaaaactaccgtgaggccttgggtgatgttgttggggattataatttcatatgccctgccttggagttcaccaagaagttctcagaatggggaaataatgcctttttctactattttgaacaccgatcctccaaacttgtttggccagaatggatgggagtgatgcatggctatgaaattgaatttgtctttggtttacctctggaaagaagagataattacacaaaagccgaggaaattttgagtagatccatagtgaaacggtgggcaaattttgcaaaatatgggaatccaaatgagactcagaacaatagcacaagctggcctgtcttcaaaagcactgaacaaaaatatctaaccttgaatacagagtcaacaagaataatgacgaaactacgtgctcaacaatgtcgattctggacatcattttttccaaaagtcttggaaatgacaggaaatattgatgaagcagaatgggagtggaaagcaggattccatcgctggaacaattacatgatggactggaaaaatcaatttaacgattacactagcaagaaagaaagttgtgtgggtctc

SEQ ID NO: 118 - protein, 574 aa, Artificial
  Synthetic butyrylcholinesterase variant
  VARIANT (227)..(227): Xaa = Ala
  VARIANT (429)..(429): P429V
EDDIIIATKNGKVRGMNLTVFGGTVTAFLGIPYAQPPLGRLRFKKPQSLTKWSDIWNATKYANSCCQNIDQSFPGFHGSEMWNPNTDLSEDCLYLNVWIPAPKPKNATVLIWIYGGGFQTGTSSLHVYDGKFLARVERVIVVSMNYRVGALGFLALPGNPEAPGNMGLFDQQLALQWVQKNIAAFGGNPKSVTLFGESAGAASVSLHLLSPGSHSLFTRAILQSGSXNAPWAVTSLYEARNRTLNLAKLTGCSRENETEIIKCLRNKDPQEILLNEAFVVPYGTPLSVNFGPTVDGDFLTDMPDILLELGQFKKTQILVGVNKDEGTAFLVYGAPGFSKDNNSIITRKEFQEGLKIFFPGVSEFGKESILFHYTDWVDDQRPENYREALGDVVGDYNFICPALEFTKKFSEWGNNAFFYYFEHRSSKLVWPEWMGVMHGYEIEFVFGLPLERRDNYTKAEEILSRSIVKRWANFAKYGNPNETQNNSTSWPVFKSTEQKYLTLNTESTRIMTKLRAQQCRFWTSFFPKVLEMTGNIDEAEWEWKAGFHRWNNYMMDWKNQFNDYTSKKESCVGL

SEQ ID NO: 119 - DNA, 1722 bp, Artificial
  Synthetic butyrylcholinesterase variant
gaagatgacatcataattgcaacaaagaatggaaaagtcagagggatgaacttgacagtttttggtggcacggtaacagcctttcttggaattccctatgcacagccacctcttggtagacttcgattcaaaaagccacagtctctgaccaagtggtctgatatttggaatgccacaaaatatgcaaattcttgctgtcagaacatagatcaaagttttccaggcttccatggatcagagatgtggaacccaaacactgacctcagtgaagactgtttatatctaaatgtatggattccagcacctaaaccaaaaaatgccactgtattgatatggatttatggtggtggttttcaaactggaacatcatctttacatgtttatgatggcaagtttctggctcgggttgaaagagttattgtagtgtcaatgaactatagggtgggtgccctaggattcttagctttgccaggaaatcctgaggctccagggaacatgggtttatttgatcaacagttggctcttcagtgggttcaaaaaaatatagcagcctttggtggaaatcctaaaagtgtaactctctttggagaaagtgcaggagcagcttcagttagcctgcatttgctttctcctggaagccattcattgttcaccagagccattctgcaaagtggttccgckaatgctccttgggcggtaacatctctttatgaagctaggaacagaacgttgaacttagctaaattgactggttgctctagagagaatgagactgaaataatcaagtgtcttagaaataaagatccccaagaaattcttctgaatgaagcatttgttgtcccctatgggactcctttgtcagtaaactttggtccgaccgtggatggtgattttctcactgacatgccagacatattacttgaacttggacaatttaaaaaaacccagattttggtgggtgttaataaagatgaagggacagcttttttagtctatggtgctcctggcttcagcaaagataacaatagtatcataactagaaaagaatttcaggaaggtttaaaaatattttttccaggagtgagtgagtttggaaaggaatccatcctttttcattacacagactgggtagatgatcagagacctgaaaactaccgtgaggccttgggtgatgttgttggggattataatttcatatgccctgccttggagttcaccaagaagttctcagaatggggaaataatgcctttttctactattttgaacaccgatcctccaaacttccgatgccagaatggatgggagtgatgcatggctatgaaattgaatttgtctttggtttacctctggaaagaagagataattacacaaaagccgaggaaattttgagtagatccatagtgaaacggtgggcaaattttgcaaaatatgggaatccaaatgagactcagaacaatagcacaagctggcctgtcttcaaaagcactgaacaaaaatatctaaccttgaatacagagtcaacaagaataatgacgaaactacgtgctcaacaatgtcgattctggacatcattttttccaaaagtcttggaaatgacaggaaatattgatgaagcagaatgggagtggaaagcaggattccatcgctggaacaattacatgatggactggaaaaatcaatttaacgattacactagcaagaaagaaagttgtgtgggtctc

SEQ ID NO: 120 - protein, 574 aa, Artificial
  Synthetic butyrylcholinesterase variant
  VARIANT (227)..(227): Xaa = Ala
  VARIANT (430)..(430): W430M
EDDIIIATKNGKVRGMNLTVFGGTVTAFLGIPYAQPPLGRLRFKKPQSLTKWSDIWNATKYANSCCQNIDQSFPGFHGSEMWNPNTDLSEDCLYLNVWIPAPKPKNATVLIWIYGGGFQTGTSSLHVYDGKFLARVERVIVVSMNYRVGALGFLALPGNPEAPGNMGLFDQQLALQWVQKNIAAFGGNPKSVTLFGESAGAASVSLHLLSPGSHSLFTRAILQSGSXNAPWAVTSLYEARNRTLNLAKLTGCSRENETEIIKCLRNKDPQEILLNEAFVVPYGTPLSVNFGPTVDGDFLTDMPDILLELGQFKKTQILVGVNKDEGTAFLVYGAPGFSKDNNSIITRKEFQEGLKIFFPGVSEFGKESILFHYTDWVDDQRPENYREALGDVVGDYNFICPALEFTKKFSEWGNNAFFYYFEHRSSKLPMPEWMGVMHGYEIEFVFGLPLERRDNYTKAEEILSRSIVKRWANFAKYGNPNETQNNSTSWPVFKSTEQKYLTLNTESTRIMTKLRAQQCRFWTSFFPKVLEMTGNIDEAEWEWKAGFHRWNNYMMDWKNQFNDYTSKKESCVGL

SEQ ID NO: 121 - DNA, 1722 bp, Artificial
  Synthetic butyrylcholinesterase variant
gaagatgacatcataattgcaacaaagaatggaaaagtcagagggatgaacttgacagtttttggtggcacggtaacagcctttcttggaattccctatgcacagccacctcttggtagacttcgattcaaaaagccacagtctctgaccaagtggtctgatatttggaatgccacaaaatatgcaaattcttgctgtcagaacatagatcaaagttttccaggcttccatggatcagagatgtggaacccaaacactgacctcagtgaagactgtttatatctaaatgtatggattccagcacctaaaccaaaaaatgccactgtattgatatggatttatggtggtggttttcaaactggaacatcatctttacatgtttatgatggcaagtttctggctcgggttgaaagagttattgtagtgtcaatgaactatagggtgggtgccctaggattcttagctttgccaggaaatcctgaggctccagggaacatgggtttatttgatcaacagttggctcttcagtgggttcaaaaaaatatagcagcctttggtggaaatcctaaaagtgtaactctctttggagaaagtgcaggagcagcttcagttagcctgcatttgctttctcctggaagccattcattgttcaccagagccattctgcaaagtggttccgckaatgctccttgggcggtaacatctctttatgaagctaggaacagaacgttgaacttagctaaattgactggttgctctagagagaatgagactgaaataatcaagtgtcttagaaataaagatccccaagaaattcttctgaatgaagcatttgttgtcccctatgggactcctttgtcagtaaactttggtccgaccgtggatggtgattttctcactgacatgccagacatattacttgaacttggacaatttaaaaaaacccagattttggtgggtgttaataaagatgaagggacagcttttttagtctatggtgctcctggcttcagcaaagataacaatagtatcataactagaaaagaatttcaggaaggtttaaaaatattttttccaggagtgagtgagtttggaaaggaatccatcctttttcattacacagactgggtagatgatcagagacctgaaaactaccgtgaggccttgggtgatgttgttggggattataatttcatatgccctgccttggagttcaccaagaagttctcagaatggggaaataatgcctttttctactattttgaacaccgatcctccaaacttccgtatccagaatggatgggagtgatgcatggctatgaaattgaatttgtctttggtttacctctggaaagaagagataattacacaaaagccgaggaaattttgagtagatccatagtgaaacggtgggcaaattttgcaaaatatgggaatccaaatgagactcagaacaatagcacaagctggcctgtcttcaaaagcactgaacaaaaatatctaaccttgaatacagagtcaacaagaataatgacgaaactacgtgctcaacaatgtcgattctggacatcattttttccaaaagtcttggaaatgacaggaaatattgatgaagcagaatgggagtggaaagcaggattccatcgctggaacaattacatgatggactggaaaaatcaatttaacgattacactagcaagaaagaaagttgtgtgggtctc

SEQ ID NO: 122 - protein, 574 aa, Artificial
  Synthetic butyrylcholinesterase variant
  VARIANT (227)..(227): Xaa = Ala
  VARIANT (430)..(430): W430Y
EDDIIIATKNGKVRGMNLTVFGGTVTAFLGIPYAQPPLGRLRFKKPQSLTKWSDIWNATKYANSCCQNIDQSFPGFHGSEMWNPNTDLSEDCLYLNVWIPAPKPKNATVLIWIYGGGFQTGTSSLHVYDGKFLARVERVIVVSMNYRVGALGFLALPGNPEAPGNMGLFDQQLALQWVQKNIAAFGGNPKSVTLFGESAGAASVSLHLLSPGSHSLFTRAILQSGSXNAPWAVTSLYEARNRTLNLAKLTGCSRENETEIIKCLRNKDPQEILLNEAFVVPYGTPLSVNFGPTVDGDFLTDMPDILLELGQFKKTQILVGVNKDEGTAFLVYGAPGFSKDNNSIITRKEFQEGLKIFFPGVSEFGKESILFHYTDWVDDQRPENYREALGDVVGDYNFICPALEFTKKFSEWGNNAFFYYFEHRSSKLPYPEWMGVMHGYEIEFVFGLPLERRDNYTKAEEILSRSIVKRWANFAKYGNPNETQNNSTSWPVFKSTEQKYLTLNTESTRIMTKLRAQQCRFWTSFFPKVLEMTGNIDEAEWEWKAGFHRWNNYMMDWKNQFNDYTSKKESCVGL

SEQ ID NO: 123 - DNA, 1722 bp, Artificial
  Synthetic butyrylcholinesterase variant
gaagatgacatcataattgcaacaaagaatggaaaagtcagagggatgaacttgacagtttttggtggcacggtaacagcctttcttggaattccctatgcacagccacctcttggtagacttcgattcaaaaagccacagtctctgaccaagtggtctgatatttggaatgccacaaaatatgcaaattcttgctgtcagaacatagatcaaagttttccaggcttccatggatcagagatgtggaacccaaacactgacctcagtgaagactgtttatatctaaatgtatggattccagcacctaaaccaaaaaatgccactgtattgatatggatttatggtggtggttttcaaactggaacatcatctttacatgtttatgatggcaagtttctggctcgggttgaaagagttattgtagtgtcaatgaactatagggtgggtgccctaggattcttagctttgccaggaaatcctgaggctccagggaacatgggtttatttgatcaacagttggctcttcagtgggttcaaaaaaatatagcagcctttggtggaaatcctaaaagtgtaactctctttggagaaagtgcaggagcagcttcagttagcctgcatttgctttctcctggaagccattcattgttcaccagagccattctgcaaagtggttccgckaatgctccttgggcggtaacatctctttatgaagctaggaacagaacgttgaacttagctaaattgactggttgctctagagagaatgagactgaaataatcaagtgtcttagaaataaagatccccaagaaattcttctgaatgaagcatttgttgtcccctatgggactcctttgtcagtaaactttggtccgaccgtggatggtgattttctcactgacatgccagacatattacttgaacttggacaatttaaaaaaacccagattttggtgggtgttaataaagatgaagggacagcttttttagtctatggtgctcctggcttcagcaaagataacaatagtatcataactagaaaagaatttcaggaaggtttaaaaatattttttccaggagtgagtgagtttggaaaggaatccatcctttttcattacacagactgggtagatgatcagagacctgaaaactaccgtgaggccttgggtgatgttgttggggattataatttcatatgccctgccttggagttcaccaagaagttctcagaatggggaaataatgcctttttctactattttgaacaccgatcctccaaacttccgtggcaggaatggatgggagtgatgcatggctatgaaattgaatttgtctttggtttacctctggaaagaagagataattacacaaaagccgaggaaattttgagtagatccatagtgaaacggtgggcaaattttgcaaaatatgggaatccaaatgagactcagaacaatagcacaagctggcctgtcttcaaaagcactgaacaaaaatatctaaccttgaatacagagtcaacaagaataatgacgaaactacgtgctcaacaatgtcgattctggacatcattttttccaaaagtcttggaaatgacaggaaatattgatgaagcagaatgggagtggaaagcaggattccatcgctggaacaattacatgatggactggaaaaatcaatttaacgattacactagcaagaaagaaagttgtgtgggtctc

SEQ ID NO: 124 - protein, 574 aa, Artificial
  Synthetic butyrylcholinesterase variant
  VARIANT (227)..(227): Xaa = Ala
  VARIANT (431)..(431): P431Q
EDDIIIATKNGKVRGMNLTVFGGTVTAFLGIPYAQPPLGRLRFKKPQSLTKWSDIWNATKYANSCCQNIDQSFPGFHGSEMWNPNTDLSEDCLYLNVWIPAPKPKNATVLIWIYGGGFQTGTSSLHVYDGKFLARVERVIVVSMNYRVGALGFLALPGNPEAPGNMGLFDQQLALQWVQKNIAAFGGNPKSVTLFGESAGAASVSLHLLSPGSHSLFTRAILQSGSXNAPWAVTSLYEARNRTLNLAKLTGCSRENETEIIKCLRNKDPQEILLNEAFVVPYGTPLSVNFGPTVDGDFLTDMPDILLELGQFKKTQILVGVNKDEGTAFLVYGAPGFSKDNNSIITRKEFQEGLKIFFPGVSEFGKESILFHYTDWVDDQRPENYREALGDVVGDYNFICPALEFTKKFSEWGNNAFFYYFEHRSSKLPWQEWMGVMHGYEIEFVFGLPLERRDNYTKAEEILSRSIVKRWANFAKYGNPNETQNNSTSWPVFKSTEQKYLTLNTESTRIMTKLRAQQCRFWTSFFPKVLEMTGNIDEAEWEWKAGFHRWNNYMMDWKNQFNDYTSKKESCVGL

SEQ ID NO: 125 - DNA, 1722 bp, Artificial
  Synthetic butyrylcholinesterase variant
gaagatgacatcataattgcaacaaagaatggaaaagtcagagggatgaacttgacagtttttggtggcacggtaacagcctttcttggaattccctatgcacagccacctcttggtagacttcgattcaaaaagccacagtctctgaccaagtggtctgatatttggaatgccacaaaatatgcaaattcttgctgtcagaacatagatcaaagttttccaggcttccatggatcagagatgtggaacccaaacactgacctcagtgaagactgtttatatctaaatgtatggattccagcacctaaaccaaaaaatgccactgtattgatatggatttatggtggtggttttcaaactggaacatcatctttacatgtttatgatggcaagtttctggctcgggttgaaagagttattgtagtgtcaatgaactatagggtgggtgccctaggattcttagctttgccaggaaatcctgaggctccagggaacatgggtttatttgatcaacagttggctcttcagtgggttcaaaaaaatatagcagcctttggtggaaatcctaaaagtgtaactctctttggagaaagtgcaggagcagcttcagttagcctgcatttgctttctcctggaagccattcattgttcaccagagccattctgcaaagtggttccgckaatgctccttgggcggtaacatctctttatgaagctaggaacagaacgttgaacttagctaaattgactggttgctctagagagaatgagactgaaataatcaagtgtcttagaaataaagatccccaagaaattcttctgaatgaagcatttgttgtcccctatgggactcctttgtcagtaaactttggtccgaccgtggatggtgattttctcactgacatgccagacatattacttgaacttggacaatttaaaaaaacccagattttggtgggtgttaataaagatgaagggacagcttttttagtctatggtgctcctggcttcagcaaagataacaatagtatcataactagaaaagaatttcaggaaggtttaaaaatattttttccaggagtgagtgagtttggaaaggaatccatcctttttcattacacagactgggtagatgatcagagacctgaaaactaccgtgaggccttgggtgatgttgttggggattataatttcatatgccctgccttggagttcaccaagaagttctcagaatggggaaataatgcctttttctactattttgaacaccgatcctccaaacttccgtggccagaagggatgggagtgatgcatggctatgaaattgaatttgtctttggtttacctctggaaagaagagataattacacaaaagccgaggaaattttgagtagatccatagtgaaacggtgggcaaattttgcaaaatatgggaatccaaatgagactcagaacaatagcacaagctggcctgtcttcaaaagcactgaacaaaaatatctaaccttgaatacagagtcaacaagaataatgacgaaactacgtgctcaacaatgtcgattctggacatcattttttccaaaagtcttggaaatgacaggaaatattgatgaagcagaatgggagtggaaagcaggattccatcgctggaacaattacatgatggactggaaaaatcaatttaacgattacactagcaagaaagaaagttgtgtgggtctc

SEQ ID NO: 126 - protein, 574 aa, Artificial
  Synthetic butyrylcholinesterase variant
  VARIANT (227)..(227): Xaa = Ala
  VARIANT (433)..(433): W433G
EDDIIIATKNGKVRGMNLTVFGGTVTAFLGIPYAQPPLGRLRFKKPQSLTKWSDIWNATKYANSCCQNIDQSFPGFHGSEMWNPNTDLSEDCLYLNVWIPAPKPKNATVLIWIYGGGFQTGTSSLHVYDGKFLARVERVIVVSMNYRVGALGFLALPGNPEAPGNMGLFDQQLALQWVQKNIAAFGGNPKSVTLFGESAGAASVSLHLLSPGSHSLFTRAILQSGSXNAPWAVTSLYEARNRTLNLAKLTGCSRENETEIIKCLRNKDPQEILLNEAFVVPYGTPLSVNFGPTVDGDFLTDMPDILLELGQFKKTQILVGVNKDEGTAFLVYGAPGFSKDNNSIITRKEFQEGLKIFFPGVSEFGKESILFHYTDWVDDQRPENYREALGDVVGDYNFICPALEFTKKFSEWGNNAFFYYFEHRSSKLPWPEGMGVMHGYEIEFVFGLPLERRDNYTKAEEILSRSIVKRWANFAKYGNPNETQNNSTSWPVFKSTEQKYLTLNTESTRIMTKLRAQQCRFWTSFFPKVLEMTGNIDEAEWEWKAGFHRWNNYMMDWKNQFNDYTSKKESCVGL

SEQ ID NO: 127 - DNA, 1722 bp, Artificial
  Synthetic butyrylcholinesterase variant
gaagatgacatcataattgcaacaaagaatggaaaagtcagagggatgaacttgacagtttttggtggcacggtaacagcctttcttggaattccctatgcacagccacctcttggtagacttcgattcaaaaagccacagtctctgaccaagtggtctgatatttggaatgccacaaaatatgcaaattcttgctgtcagaacatagatcaaagttttccaggcttccatggatcagagatgtggaacccaaacactgacctcagtgaagactgtttatatctaaatgtatggattccagcacctaaaccaaaaaatgccactgtattgatatggatttatggtggtggttttcaaactggaacatcatctttacatgtttatgatggcaagtttctggctcgggttgaaagagttattgtagtgtcaatgaactatagggtgggtgccctaggattcttagctttgccaggaaatcctgaggctccagggaacatgggtttatttgatcaacagttggctcttcagtgggttcaaaaaaatatagcagcctttggtggaaatcctaaaagtgtaactctctttggagaaagtgcaggagcagcttcagttagcctgcatttgctttctcctggaagccattcattgttcaccagagccattctgcaaagtggttccgckaatgctccttgggcggtaacatctctttatgaagctaggaacagaacgttgaacttagctaaattgactggttgctctagagagaatgagactgaaataatcaagtgtcttagaaataaagatccccaagaaattcttctgaatgaagcatttgttgtcccctatgggactcctttgtcagtaaactttggtccgaccgtggatggtgattttctcactgacatgccagacatattacttgaacttggacaatttaaaaaaacccagattttggtgggtgttaataaagatgaagggacagcttttttagtctatggtgctcctggcttcagcaaagataacaatagtatcataactagaaaagaatttcaggaaggtttaaaaatattttttccaggagtgagtgagtttggaaaggaatccatcctttttcattacacagactgggtagatgatcagagacctgaaaactaccgtgaggccttgggtgatgttgttggggattataatttcatatgccctgccttggagttcaccaagaagttctcagaatggggaaataatgcctttttctactattttgaacaccgatcctccaaacttccgtggccagaatggtttggagtgatgcatggctatgaaattgaatttgtctttggtttacctctggaaagaagagataattacacaaaagccgaggaaattttgagtagatccatagtgaaacggtgggcaaattttgcaaaatatgggaatccaaatgagactcagaacaatagcacaagctggcctgtcttcaaaagcactgaacaaaaatatctaaccttgaatacagagtcaacaagaataatgacgaaactacgtgctcaacaatgtcgattctggacatcattttttccaaaagtcttggaaatgacaggaaatattgatgaagcagaatgggagtggaaagcaggattccatcgctggaacaattacatgatggactggaaaaatcaatttaacgattacactagcaagaaagaaagttgtgtgggtctc

SEQ ID NO: 128 - protein, 574 aa, Artificial
  Synthetic butyrylcholinesterase variant
  VARIANT (227)..(227): Xaa = Ala
  VARIANT (434)..(434): M434F
EDDIIIATKNGKVRGMNLTVFGGTVTAFLGIPYAQPPLGRLRFKKPQSLTKWSDIWNATKYANSCCQNIDQSFPGFHGSEMWNPNTDLSEDCLYLNVWIPAPKPKNATVLIWIYGGGFQTGTSSLHVYDGKFLARVERVIVVSMNYRVGALGFLALPGNPEAPGNMGLFDQQLALQWVQKNIAAFGGNPKSVTLFGESAGAASVSLHLLSPGSHSLFTRAILQSGSXNAPWAVTSLYEARNRTLNLAKLTGCSRENETEIIKCLRNKDPQEILLNEAFVVPYGTPLSVNFGPTVDGDFLTDMPDILLELGQFKKTQILVGVNKDEGTAFLVYGAPGFSKDNNSIITRKEFQEGLKIFFPGVSEFGKESILFHYTDWVDDQRPENYREALGDVVGDYNFICPALEFTKKFSEWGNNAFFYYFEHRSSKLPWPEWFGVMHGYEIEFVFGLPLERRDNYTKAEEILSRSIVKRWANFAKYGNPNETQNNSTSWPVFKSTEQKYLTLNTESTRIMTKLRAQQCRFWTSFFPKVLEMTGNIDEAEWEWKAGFHRWNNYMMDWKNQFNDYTSKKESCVGL

SEQ ID NO: 129 - DNA, 1722 bp, Artificial
  Synthetic butyrylcholinesterase variant
gaagatgacatcataattgcaacaaagaatggaaaagtcagagggatgaacttgacagtttttggtggcacggtaacagcctttcttggaattccctatgcacagccacctcttggtagacttcgattcaaaaagccacagtctctgaccaagtggtctgatatttggaatgccacaaaatatgcaaattcttgctgtcagaacatagatcaaagttttccaggcttccatggatcagagatgtggaacccaaacactgacctcagtgaagactgtttatatctaaatgtatggattccagcacctaaaccaaaaaatgccactgtattgatatggatttatggtggtggttttcaaactggaacatcatctttacatgtttatgatggcaagtttctggctcgggttgaaagagttattgtagtgtcaatgaactatagggtgggtgccctaggattcttagctttgccaggaaatcctgaggctccagggaacatgggtttatttgatcaacagttggctcttcagtgggttcaaaaaaatatagcagcctttggtggaaatcctaaaagtgtaactctctttggagaaagtgcaggagcagcttcagttagcctgcatttgctttctcctggaagccattcattgttcaccagagccattctgcaaagtggttccgckaatgctccttgggcggtaacatctctttatgaagctaggaacagaacgttgaacttagctaaattgactggttgctctagagagaatgagactgaaataatcaagtgtcttagaaataaagatccccaagaaattcttctgaatgaagcatttgttgtcccctatgggactcctttgtcagtaaactttggtccgaccgtggatggtgattttctcactgacatgccagacatattacttgaacttggacaatttaaaaaaacccagattttggtgggtgttaataaagatgaagggacagcttttttagtctatggtgctcctggcttcagcaaagataacaatagtatcataactagaaaagaatttcaggaaggtttaaaaatattttttccaggagtgagtgagtttggaaaggaatccatcctttttcattacacagactgggtagatgatcagagacctgaaaactaccgtgaggccttgggtgatgttgttggggattataatttcatatgccctgccttggagttcaccaagaagttctcagaatggggaaataatgcctttttctactattttgaacaccgatcctccaaacttccgtggccagaatgggggggagtgatgcatggctatgaaattgaatttgtctttggtttacctctggaaagaagagataattacacaaaagccgaggaaattttgagtagatccatagtgaaacggtgggcaaattttgcaaaatatgggaatccaaatgagactcagaacaatagcacaagctggcctgtcttcaaaagcactgaacaaaaatatctaaccttgaatacagagtcaacaagaataatgacgaaactacgtgctcaacaatgtcgattctggacatcattttttccaaaagtcttggaaatgacaggaaatattgatgaagcagaatgggagtggaaagcaggattccatcgctggaacaattacatgatggactggaaaaatcaatttaacgattacactagcaagaaagaaagttgtgtgggtctc

SEQ ID NO: 130 - protein, 574 aa, Artificial
  Synthetic butyrylcholinesterase variant
  VARIANT (227)..(227): Xaa = Ala
  VARIANT (434)..(434): M434G
EDDIIIATKNGKVRGMNLTVFGGTVTAFLGIPYAQPPLGRLRFKKPQSLTKWSDIWNATKYANSCCQNIDQSFPGFHGSEMWNPNTDLSEDCLYLNVWIPAPKPKNATVLIWIYGGGFQTGTSSLHVYDGKFLARVERVIVVSMNYRVGALGFLALPGNPEAPGNMGLFDQQLALQWVQKNIAAFGGNPKSVTLFGESAGAASVSLHLLSPGSHSLFTRAILQSGSXNAPWAVTSLYEARNRTLNLAKLTGCSRENETEIIKCLRNKDPQEILLNEAFVVPYGTPLSVNFGPTVDGDFLTDMPDILLELGQFKKTQILVGVNKDEGTAFLVYGAPGFSKDNNSIITRKEFQEGLKIFFPGVSEFGKESILFHYTDWVDDQRPENYREALGDVVGDYNFICPALEFTKKFSEWGNNAFFYYFEHRSSKLPWPEWGGVMHGYEIEFVFGLPLERRDNYTKAEEILSRSIVKRWANFAKYGNPNETQNNSTSWPVFKSTEQKYLTLNTESTRIMTKLRAQQCRFWTSFFPKVLEMTGNIDEAEWEWKAGFHRWNNYMMDWKNQFNDYTSKKESCVGL

SEQ ID NO: 131 - DNA, 1722 bp, Artificial
  Synthetic butyrylcholinesterase variant
gaagatgacatcataattgcaacaaagaatggaaaagtcagagggatgaacttgacagtttttggtggcacggtaacagcctttcttggaattccctatgcacagccacctcttggtagacttcgattcaaaaagccacagtctctgaccaagtggtctgatatttggaatgccacaaaatatgcaaattcttgctgtcagaacatagatcaaagttttccaggcttccatggatcagagatgtggaacccaaacactgacctcagtgaagactgtttatatctaaatgtatggattccagcacctaaaccaaaaaatgccactgtattgatatggatttatggtggtggttttcaaactggaacatcatctttacatgtttatgatggcaagtttctggctcgggttgaaagagttattgtagtgtcaatgaactatagggtgggtgccctaggattcttagctttgccaggaaatcctgaggctccagggaacatgggtttatttgatcaacagttggctcttcagtgggttcaaaaaaatatagcagcctttggtggaaatcctaaaagtgtaactctctttggagaaagtgcaggagcagcttcagttagcctgcatttgctttctcctggaagccattcattgttcaccagagccattctgcaaagtggttccgckaatgctccttgggcggtaacatctctttatgaagctaggaacagaacgttgaacttagctaaattgactggttgctctagagagaatgagactgaaataatcaagtgtcttagaaataaagatccccaagaaattcttctgaatgaagcatttgttgtcccctatgggactcctttgtcagtaaactttggtccgaccgtggatggtgattttctcactgacatgccagacatattacttgaacttggacaatttaaaaaaacccagattttggtgggtgttaataaagatgaagggacagcttttttagtctatggtgctcctggcttcagcaaagataacaatagtatcataactagaaaagaatttcaggaaggtttaaaaatattttttccaggagtgagtgagtttggaaaggaatccatcctttttcattacacagactgggtagatgatcagagacctgaaaactaccgtgaggccttgggtgatgttgttggggattataatttcatatgccctgccttggagttcaccaagaagttctcagaatggggaaataatgcctttttctactattttgaacaccgatcctccaaacttccgtggccagaatggaagggagtgatgcatggctatgaaattgaatttgtctttggtttacctctggaaagaagagataattacacaaaagccgaggaaattttgagtagatccatagtgaaacggtgggcaaattttgcaaaatatgggaatccaaatgagactcagaacaatagcacaagctggcctgtcttcaaaagcactgaacaaaaatatctaaccttgaatacagagtcaacaagaataatgacgaaactacgtgctcaacaatgtcgattctggacatcattttttccaaaagtcttggaaatgacaggaaatattgatgaagcagaatgggagtggaaagcaggattccatcgctggaacaattacatgatggactggaaaaatcaatttaacgattacactagcaagaaagaaagttgtgtgggtctc

SEQ ID NO: 132 - protein, 574 aa, Artificial
  Synthetic butyrylcholinesterase variant
  VARIANT (227)..(227): Xaa = Ala
  VARIANT (434)..(434): M434K
EDDIIIATKNGKVRGMNLTVFGGTVTAFLGIPYAQPPLGRLRFKKPQSLTKWSDIWNATKYANSCCQNIDQSFPGFHGSEMWNPNTDLSEDCLYLNVWIPAPKPKNATVLIWIYGGGFQTGTSSLHVYDGKFLARVERVIVVSMNYRVGALGFLALPGNPEAPGNMGLFDQQLALQWVQKNIAAFGGNPKSVTLFGESAGAASVSLHLLSPGSHSLFTRAILQSGSXNAPWAVTSLYEARNRTLNLAKLTGCSRENETEIIKCLRNKDPQEILLNEAFVVPYGTPLSVNFGPTVDGDFLTDMPDILLELGQFKKTQILVGVNKDEGTAFLVYGAPGFSKDNNSIITRKEFQEGLKIFFPGVSEFGKESILFHYTDWVDDQRPENYREALGDVVGDYNFICPALEFTKKFSEWGNNAFFYYFEHRSSKLPWPEWKGVMHGYEIEFVFGLPLERRDNYTKAEEILSRSIVKRWANFAKYGNPNETQNNSTSWPVFKSTEQKYLTLNTESTRIMTKLRAQQCRFWTSFFPKVLEMTGNIDEAEWEWKAGFHRWNNYMMDWKNQFNDYTSKKESCVGL

SEQ ID NO: 133 - DNA, 1722 bp, Artificial
  Synthetic butyrylcholinesterase variant
gaagatgacatcataattgcaacaaagaatggaaaagtcagagggatgaacttgacagtttttggtggcacggtaacagcctttcttggaattccctatgcacagccacctcttggtagacttcgattcaaaaagccacagtctctgaccaagtggtctgatatttggaatgccacaaaatatgcaaattcttgctgtcagaacatagatcaaagttttccaggcttccatggatcagagatgtggaacccaaacactgacctcagtgaagactgtttatatctaaatgtatggattccagcacctaaaccaaaaaatgccactgtattgatatggatttatggtggtggttttcaaactggaacatcatctttacatgtttatgatggcaagtttctggctcgggttgaaagagttattgtagtgtcaatgaactatagggtgggtgccctaggattcttagctttgccaggaaatcctgaggctccagggaacatgggtttatttgatcaacagttggctcttcagtgggttcaaaaaaatatagcagcctttggtggaaatcctaaaagtgtaactctctttggagaaagtgcaggagcagcttcagttagcctgcatttgctttctcctggaagccattcattgttcaccagagccattctgcaaagtggttccgckaatgctccttgggcggtaacatctctttatgaagctaggaacagaacgttgaacttagctaaattgactggttgctctagagagaatgagactgaaataatcaagtgtcttagaaataaagatccccaagaaattcttctgaatgaagcatttgttgtcccctatgggactcctttgtcagtaaactttggtccgaccgtggatggtgattttctcactgacatgccagacatattacttgaacttggacaatttaaaaaaacccagattttggtgggtgttaataaagatgaagggacagcttttttagtctatggtgctcctggcttcagcaaagataacaatagtatcataactagaaaagaatttcaggaaggtttaaaaatattttttccaggagtgagtgagtttggaaaggaatccatcctttttcattacacagactgggtagatgatcagagacctgaaaactaccgtgaggccttgggtgatgttgttggggattataatttcatatgccctgccttggagttcaccaagaagttctcagaatggggaaataatgcctttttctactattttgaacaccgatcctccaaacttccgtggccagaatggctgggagtgatgcatggctatgaaattgaatttgtctttggtttacctctggaaagaagagataattacacaaaagccgaggaaattttgagtagatccatagtgaaacggtgggcaaattttgcaaaatatgggaatccaaatgagactcagaacaatagcacaagctggcctgtcttcaaaagcactgaacaaaaatatctaaccttgaatacagagtcaacaagaataatgacgaaactacgtgctcaacaatgtcgattctggacatcattttttccaaaagtcttggaaatgacaggaaatattgatgaagcagaatgggagtggaaagcaggattccatcgctggaacaattacatgatggactggaaaaatcaatttaacgattacactagcaagaaagaaagttgtgtgggtctc

SEQ ID NO: 134 - protein, 574 aa, Artificial
  Synthetic butyrylcholinesterase variant
  VARIANT (227)..(227): Xaa = Ala
  VARIANT (434)..(434): M434L
EDDIIIATKNGKVRGMNLTVFGGTVTAFLGIPYAQPPLGRLRFKKPQSLTKWSDIWNATKYANSCCQNIDQSFPGFHGSEMWNPNTDLSEDCLYLNVWIPAPKPKNATVLIWIYGGGFQTGTSSLHVYDGKFLARVERVIVVSMNYRVGALGFLALPGNPEAPGNMGLFDQQLALQWVQKNIAAFGGNPKSVTLFGESAGAASVSLHLLSPGSHSLFTRAILQSGSXNAPWAVTSLYEARNRTLNLAKLTGCSRENETEIIKCLRNKDPQEILLNEAFVVPYGTPLSVNFGPTVDGDFLTDMPDILLELGQFKKTQILVGVNKDEGTAFLVYGAPGFSKDNNSIITRKEFQEGLKIFFPGVSEFGKESILFHYTDWVDDQRPENYREALGDVVGDYNFICPALEFTKKFSEWGNNAFFYYFEHRSSKLPWPEWLGVMHGYEIEFVFGLPLERRDNYTKAEEILSRSIVKRWANFAKYGNPNETQNNSTSWPVFKSTEQKYLTLNTESTRIMTKLRAQQCRFWTSFFPKVLEMTGNIDEAEWEWKAGFHRWNNYMMDWKNQFNDYTSKKESCVGL

SEQ ID NO: 135 - DNA, 1722 bp, Artificial
  Synthetic butyrylcholinesterase variant
gaagatgacatcataattgcaacaaagaatggaaaagtcagagggatgaacttgacagtttttggtggcacggtaacagcctttcttggaattccctatgcacagccacctcttggtagacttcgattcaaaaagccacagtctctgaccaagtggtctgatatttggaatgccacaaaatatgcaaattcttgctgtcagaacatagatcaaagttttccaggcttccatggatcagagatgtggaacccaaacactgacctcagtgaagactgtttatatctaaatgtatggattccagcacctaaaccaaaaaatgccactgtattgatatggatttatggtggtggttttcaaactggaacatcatctttacatgtttatgatggcaagtttctggctcgggttgaaagagttattgtagtgtcaatgaactatagggtgggtgccctaggattcttagctttgccaggaaatcctgaggctccagggaacatgggtttatttgatcaacagttggctcttcagtgggttcaaaaaaatatagcagcctttggtggaaatcctaaaagtgtaactctctttggagaaagtgcaggagcagcttcagttagcctgcatttgctttctcctggaagccattcattgttcaccagagccattctgcaaagtggttccgckaatgctccttgggcggtaacatctctttatgaagctaggaacagaacgttgaacttagctaaattgactggttgctctagagagaatgagactgaaataatcaagtgtcttagaaataaagatccccaagaaattcttctgaatgaagcatttgttgtcccctatgggactcctttgtcagtaaactttggtccgaccgtggatggtgattttctcactgacatgccagacatattacttgaacttggacaatttaaaaaaacccagattttggtgggtgttaataaagatgaagggacagcttttttagtctatggtgctcctggcttcagcaaagataacaatagtatcataactagaaaagaatttcaggaaggtttaaaaatattttttccaggagtgagtgagtttggaaaggaatccatcctttttcattacacagactgggtagatgatcagagacctgaaaactaccgtgaggccttgggtgatgttgttggggattataatttcatatgccctgccttggagttcaccaagaagttctcagaatggggaaataatgcctttttctactattttgaacaccgatcctccaaacttccgtggccagaatggaatggagtgatgcatggctatgaaattgaatttgtctttggtttacctctggaaagaagagataattacacaaaagccgaggaaattttgagtagatccatagtgaaacggtgggcaaattttgcaaaatatgggaatccaaatgagactcagaacaatagcacaagctggcctgtcttcaaaagcactgaacaaaaatatctaaccttgaatacagagtcaacaagaataatgacgaaactacgtgctcaacaatgtcgattctggacatcattttttccaaaagtcttggaaatgacaggaaatattgatgaagcagaatgggagtggaaagcaggattccatcgctggaacaattacatgatggactggaaaaatcaatttaacgattacactagcaagaaagaaagttgtgtgggtctc

SEQ ID NO: 136 - protein, 574 aa, Artificial
  Synthetic butyrylcholinesterase variant
  VARIANT (227)..(227): Xaa = Ala
  VARIANT (434)..(434): M434N
EDDIIIATKNGKVRGMNLTVFGGTVTAFLGIPYAQPPLGRLRFKKPQSLTKWSDIWNATKYANSCCQNIDQSFPGFHGSEMWNPNTDLSEDCLYLNVWIPAPKPKNATVLIWIYGGGFQTGTSSLHVYDGKFLARVERVIVVSMNYRVGALGFLALPGNPEAPGNMGLFDQQLALQWVQKNIAAFGGNPKSVTLFGESAGAASVSLHLLSPGSHSLFTRAILQSGSXNAPWAVTSLYEARNRTLNLAKLTGCSRENETEIIKCLRNKDPQEILLNEAFVVPYGTPLSVNFGPTVDGDFLTDMPDILLELGQFKKTQILVGVNKDEGTAFLVYGAPGFSKDNNSIITRKEFQEGLKIFFPGVSEFGKESILFHYTDWVDDQRPENYREALGDVVGDYNFICPALEFTKKFSEWGNNAFFYYFEHRSSKLPWPEWNGVMHGYEIEFVFGLPLERRDNYTKAEEILSRSIVKRWANFAKYGNPNETQNNSTSWPVFKSTEQKYLTLNTESTRIMTKLRAQQCRFWTSFFPKVLEMTGNIDEAEWEWKAGFHRWNNYMMDWKNQFNDYTSKKESCVGL

SEQ ID NO: 137 - DNA, 1722 bp, Artificial
  Synthetic butyrylcholinesterase variant
gaagatgacatcataattgcaacaaagaatggaaaagtcagagggatgaacttgacagtttttggtggcacggtaacagcctttcttggaattccctatgcacagccacctcttggtagacttcgattcaaaaagccacagtctctgaccaagtggtctgatatttggaatgccacaaaatatgcaaattcttgctgtcagaacatagatcaaagttttccaggcttccatggatcagagatgtggaacccaaacactgacctcagtgaagactgtttatatctaaatgtatggattccagcacctaaaccaaaaaatgccactgtattgatatggatttatggtggtggttttcaaactggaacatcatctttacatgtttatgatggcaagtttctggctcgggttgaaagagttattgtagtgtcaatgaactatagggtgggtgccctaggattcttagctttgccaggaaatcctgaggctccagggaacatgggtttatttgatcaacagttggctcttcagtgggttcaaaaaaatatagcagcctttggtggaaatcctaaaagtgtaactctctttggagaaagtgcaggagcagcttcagttagcctgcatttgctttctcctggaagccattcattgttcaccagagccattctgcaaagtggttccgckaatgctccttgggcggtaacatctctttatgaagctaggaacagaacgttgaacttagctaaattgactggttgctctagagagaatgagactgaaataatcaagtgtcttagaaataaagatccccaagaaattcttctgaatgaagcatttgttgtcccctatgggactcctttgtcagtaaactttggtccgaccgtggatggtgattttctcactgacatgccagacatattacttgaacttggacaatttaaaaaaacccagattttggtgggtgttaataaagatgaagggacagcttttttagtctatggtgctcctggcttcagcaaagataacaatagtatcataactagaaaagaatttcaggaaggtttaaaaatattttttccaggagtgagtgagtttggaaaggaatccatcctttttcattacacagactgggtagatgatcagagacctgaaaactaccgtgaggccttgggtgatgttgttggggattataatttcatatgccctgccttggagttcaccaagaagttctcagaatggggaaataatgcctttttctactattttgaacaccgatcctccaaacttccgtggccagaatggtcgggagtgatgcatggctatgaaattgaatttgtctttggtttacctctggaaagaagagataattacacaaaagccgaggaaattttgagtagatccatagtgaaacggtgggcaaattttgcaaaatatgggaatccaaatgagactcagaacaatagcacaagctggcctgtcttcaaaagcactgaacaaaaatatctaaccttgaatacagagtcaacaagaataatgacgaaactacgtgctcaacaatgtcgattctggacatcattttttccaaaagtcttggaaatgacaggaaatattgatgaagcagaatgggagtggaaagcaggattccatcgctggaacaattacatgatggactggaaaaatcaatttaacgattacactagcaagaaagaaagttgtgtgggtctc

SEQ ID NO: 138 - protein, 574 aa, Artificial
  Synthetic butyrylcholinesterase variant
  VARIANT (227)..(227): Xaa = Ala
  VARIANT (434)..(434): M434S
EDDIIIATKNGKVRGMNLTVFGGTVTAFLGIPYAQPPLGRLRFKKPQSLTKWSDIWNATKYANSCCQNIDQSFPGFHGSEMWNPNTDLSEDCLYLNVWIPAPKPKNATVLIWIYGGGFQTGTSSLHVYDGKFLARVERVIVVSMNYRVGALGFLALPGNPEAPGNMGLFDQQLALQWVQKNIAAFGGNPKSVTLFGESAGAASVSLHLLSPGSHSLFTRAILQSGSXNAPWAVTSLYEARNRTLNLAKLTGCSRENETEIIKCLRNKDPQEILLNEAFVVPYGTPLSVNFGPTVDGDFLTDMPDILLELGQFKKTQILVGVNKDEGTAFLVYGAPGFSKDNNSIITRKEFQEGLKIFFPGVSEFGKESILFHYTDWVDDQRPENYREALGDVVGDYNFICPALEFTKKFSEWGNNAFFYYFEHRSSKLPWPEWSGVMHGYEIEFVFGLPLERRDNYTKAEEILSRSIVKRWANFAKYGNPNETQNNSTSWPVFKSTEQKYLTLNTESTRIMTKLRAQQCRFWTSFFPKVLEMTGNIDEAEWEWKAGFHRWNNYMMDWKNQFNDYTSKKESCVGL

SEQ ID NO: 139 - DNA, 1722 bp, Artificial
  Synthetic butyrylcholinesterase variant
gaagatgacatcataattgcaacaaagaatggaaaagtcagagggatgaacttgacagtttttggtggcacggtaacagcctttcttggaattccctatgcacagccacctcttggtagacttcgattcaaaaagccacagtctctgaccaagtggtctgatatttggaatgccacaaaatatgcaaattcttgctgtcagaacatagatcaaagttttccaggcttccatggatcagagatgtggaacccaaacactgacctcagtgaagactgtttatatctaaatgtatggattccagcacctaaaccaaaaaatgccactgtattgatatggatttatggtggtggttttcaaactggaacatcatctttacatgtttatgatggcaagtttctggctcgggttgaaagagttattgtagtgtcaatgaactatagggtgggtgccctaggattcttagctttgccaggaaatcctgaggctccagggaacatgggtttatttgatcaacagttggctcttcagtgggttcaaaaaaatatagcagcctttggtggaaatcctaaaagtgtaactctctttggagaaagtgcaggagcagcttcagttagcctgcatttgctttctcctggaagccattcattgttcaccagagccattctgcaaagtggttccgckaatgctccttgggcggtaacatctctttatgaagctaggaacagaacgttgaacttagctaaattgactggttgctctagagagaatgagactgaaataatcaagtgtcttagaaataaagatccccaagaaattcttctgaatgaagcatttgttgtcccctatgggactcctttgtcagtaaactttggtccgaccgtggatggtgattttctcactgacatgccagacatattacttgaacttggacaatttaaaaaaacccagattttggtgggtgttaataaagatgaagggacagcttttttagtctatggtgctcctggcttcagcaaagataacaatagtatcataactagaaaagaatttcaggaaggtttaaaaatattttttccaggagtgagtgagtttggaaaggaatccatcctttttcattacacagactgggtagatgatcagagacctgaaaactaccgtgaggccttgggtgatgttgttggggattataatttcatatgccctgccttggagttcaccaagaagttctcagaatggggaaataatgcctttttctactattttgaacaccgatcctccaaacttccgtggccagaatggtggggagtgatgcatggctatgaaattgaatttgtctttggtttacctctggaaagaagagataattacacaaaagccgaggaaattttgagtagatccatagtgaaacggtgggcaaattttgcaaaatatgggaatccaaatgagactcagaacaatagcacaagctggcctgtcttcaaaagcactgaacaaaaatatctaaccttgaatacagagtcaacaagaataatgacgaaactacgtgctcaacaatgtcgattctggacatcattttttccaaaagtcttggaaatgacaggaaatattgatgaagcagaatgggagtggaaagcaggattccatcgctggaacaattacatgatggactggaaaaatcaatttaacgattacactagcaagaaagaaagttgtgtgggtctc

SEQ ID NO: 140 - protein, 574 aa, Artificial
  Synthetic butyrylcholinesterase variant
  VARIANT (227)..(227): Xaa = Ala
  VARIANT (434)..(434): M434W
EDDIIIATKNGKVRGMNLTVFGGTVTAFLGIPYAQPPLGRLRFKKPQSLTKWSDIWNATKYANSCCQNIDQSFPGFHGSEMWNPNTDLSEDCLYLNVWIPAPKPKNATVLIWIYGGGFQTGTSSLHVYDGKFLARVERVIVVSMNYRVGALGFLALPGNPEAPGNMGLFDQQLALQWVQKNIAAFGGNPKSVTLFGESAGAASVSLHLLSPGSHSLFTRAILQSGSXNAPWAVTSLYEARNRTLNLAKLTGCSRENETEIIKCLRNKDPQEILLNEAFVVPYGTPLSVNFGPTVDGDFLTDMPDILLELGQFKKTQILVGVNKDEGTAFLVYGAPGFSKDNNSIITRKEFQEGLKIFFPGVSEFGKESILFHYTDWVDDQRPENYREALGDVVGDYNFICPALEFTKKFSEWGNNAFFYYFEHRSSKLPWPEWWGVMHGYEIEFVFGLPLERRDNYTKAEEILSRSIVKRWANFAKYGNPNETQNNSTSWPVFKSTEQKYLTLNTESTRIMTKLRAQQCRFWTSFFPKVLEMTGNIDEAEWEWKAGFHRWNNYMMDWKNQFNDYTSKKESCVGL

SEQ ID NO: 141 - DNA, 1722 bp, Artificial
  Synthetic butyrylcholinesterase variant
gaagatgacatcataattgcaacaaagaatggaaaagtcagagggatgaacttgacagtttttggtggcacggtaacagcctttcttggaattccctatgcacagccacctcttggtagacttcgattcaaaaagccacagtctctgaccaagtggtctgatatttggaatgccacaaaatatgcaaattcttgctgtcagaacatagatcaaagttttccaggcttccatggatcagagatgtggaacccaaacactgacctcagtgaagactgtttatatctaaatgtatggattccagcacctaaaccaaaaaatgccactgtattgatatggatttatggtggtggttttcaaactggaacatcatctttacatgtttatgatggcaagtttctggctcgggttgaaagagttattgtagtgtcaatgaactatagggtgggtgccctaggattcttagctttgccaggaaatcctgaggctccagggaacatgggtttatttgatcaacagttggctcttcagtgggttcaaaaaaatatagcagcctttggtggaaatcctaaaagtgtaactctctttggagaaagtgcaggagcagcttcagttagcctgcatttgctttctcctggaagccattcattgttcaccagagccattctgcaaagtggttccgckaatgctccttgggcggtaacatctctttatgaagctaggaacagaacgttgaacttagctaaattgactggttgctctagagagaatgagactgaaataatcaagtgtcttagaaataaagatccccaagaaattcttctgaatgaagcatttgttgtcccctatgggactcctttgtcagtaaactttggtccgaccgtggatggtgattttctcactgacatgccagacatattacttgaacttggacaatttaaaaaaacccagattttggtgggtgttaataaagatgaagggacagcttttttagtctatggtgctcctggcttcagcaaagataacaatagtatcataactagaaaagaatttcaggaaggtttaaaaatattttttccaggagtgagtgagtttggaaaggaatccatcctttttcattacacagactgggtagatgatcagagacctgaaaactaccgtgaggccttgggtgatgttgttggggattataatttcatatgccctgccttggagttcaccaagaagttctcagaatggggaaataatgcctttttctactattttgaacaccgatcctccaaacttccgtggccagaatggatgtgtgtgatgcatggctatgaaattgaatttgtctttggtttacctctggaaagaagagataattacacaaaagccgaggaaattttgagtagatccatagtgaaacggtgggcaaattttgcaaaatatgggaatccaaatgagactcagaacaatagcacaagctggcctgtcttcaaaagcactgaacaaaaatatctaaccttgaatacagagtcaacaagaataatgacgaaactacgtgctcaacaatgtcgattctggacatcattttttccaaaagtcttggaaatgacaggaaatattgatgaagcagaatgggagtggaaagcaggattccatcgctggaacaattacatgatggactggaaaaatcaatttaacgattacactagcaagaaagaaagttgtgtgggtctc

SEQ ID NO: 142 - protein, 574 aa, Artificial
  Synthetic butyrylcholinesterase variant
  VARIANT (227)..(227): Xaa = Ala
  VARIANT (435)..(435): G435C
EDDIIIATKNGKVRGMNLTVFGGTVTAFLGIPYAQPPLGRLRFKKPQSLTKWSDIWNATKYANSCCQNIDQSFPGFHGSEMWNPNTDLSEDCLYLNVWIPAPKPKNATVLIWIYGGGFQTGTSSLHVYDGKFLARVERVIVVSMNYRVGALGFLALPGNPEAPGNMGLFDQQLALQWVQKNIAAFGGNPKSVTLFGESAGAASVSLHLLSPGSHSLFTRAILQSGSXNAPWAVTSLYEARNRTLNLAKLTGCSRENETEIIKCLRNKDPQEILLNEAFVVPYGTPLSVNFGPTVDGDFLTDMPDILLELGQFKKTQILVGVNKDEGTAFLVYGAPGFSKDNNSIITRKEFQEGLKIFFPGVSEFGKESILFHYTDWVDDQRPENYREALGDVVGDYNFICPALEFTKKFSEWGNNAFFYYFEHRSSKLPWPEWMCVMHGYEIEFVFGLPLERRDNYTKAEEILSRSIVKRWANFAKYGNPNETQNNSTSWPVFKSTEQKYLTLNTESTRIMTKLRAQQCRFWTSFFPKVLEMTGNIDEAEWEWKAGFHRWNNYMMDWKNQFNDYTSKKESCVGL

SEQ ID NO: 143 - DNA, 1722 bp, Artificial
  Synthetic butyrylcholinesterase variant
gaagatgacatcataattgcaacaaagaatggaaaagtcagagggatgaacttgacagtttttggtggcacggtaacagcctttcttggaattccctatgcacagccacctcttggtagacttcgattcaaaaagccacagtctctgaccaagtggtctgatatttggaatgccacaaaatatgcaaattcttgctgtcagaacatagatcaaagttttccaggcttccatggatcagagatgtggaacccaaacactgacctcagtgaagactgtttatatctaaatgtatggattccagcacctaaaccaaaaaatgccactgtattgatatggatttatggtggtggttttcaaactggaacatcatctttacatgtttatgatggcaagtttctggctcgggttgaaagagttattgtagtgtcaatgaactatagggtgggtgccctaggattcttagctttgccaggaaatcctgaggctccagggaacatgggtttatttgatcaacagttggctcttcagtgggttcaaaaaaatatagcagcctttggtggaaatcctaaaagtgtaactctctttggagaaagtgcaggagcagcttcagttagcctgcatttgctttctcctggaagccattcattgttcaccagagccattctgcaaagtggttccgckaatgctccttgggcggtaacatctctttatgaagctaggaacagaacgttgaacttagctaaattgactggttgctctagagagaatgagactgaaataatcaagtgtcttagaaataaagatccccaagaaattcttctgaatgaagcatttgttgtcccctatgggactcctttgtcagtaaactttggtccgaccgtggatggtgattttctcactgacatgccagacatattacttgaacttggacaatttaaaaaaacccagattttggtgggtgttaataaagatgaagggacagcttttttagtctatggtgctcctggcttcagcaaagataacaatagtatcataactagaaaagaatttcaggaaggtttaaaaatattttttccaggagtgagtgagtttggaaaggaatccatcctttttcattacacagactgggtagatgatcagagacctgaaaactaccgtgaggccttgggtgatgttgttggggattataatttcatatgccctgccttggagttcaccaagaagttctcagaatggggaaataatgcctttttctactattttgaacaccgatcctccaaacttccgtggccagaatggatgggagtggggcatggctatgaaattgaatttgtctttggtttacctctggaaagaagagataattacacaaaagccgaggaaattttgagtagatccatagtgaaacggtgggcaaattttgcaaaatatgggaatccaaatgagactcagaacaatagcacaagctggcctgtcttcaaaagcactgaacaaaaatatctaaccttgaatacagagtcaacaagaataatgacgaaactacgtgctcaacaatgtcgattctggacatcattttttccaaaagtcttggaaatgacaggaaatattgatgaagcagaatgggagtggaaagcaggattccatcgctggaacaattacatgatggactggaaaaatcaatttaacgattacactagcaagaaagaaagttgtgtgggtctc

SEQ ID NO: 144 - protein, 574 aa, Artificial
  Synthetic butyrylcholinesterase variant
  VARIANT (227)..(227): Xaa = Ala
  VARIANT (437)..(437): M437G
EDDIIIATKNGKVRGMNLTVFGGTVTAFLGIPYAQPPLGRLRFKKPQSLTKWSDIWNATKYANSCCQNIDQSFPGFHGSEMWNPNTDLSEDCLYLNVWIPAPKPKNATVLIWIYGGGFQTGTSSLHVYDGKFLARVERVIVVSMNYRVGALGFLALPGNPEAPGNMGLFDQQLALQWVQKNIAAFGGNPKSVTLFGESAGAASVSLHLLSPGSHSLFTRAILQSGSXNAPWAVTSLYEARNRTLNLAKLTGCSRENETEIIKCLRNKDPQEILLNEAFVVPYGTPLSVNFGPTVDGDFLTDMPDILLELGQFKKTQILVGVNKDEGTAFLVYGAPGFSKDNNSIITRKEFQEGLKIFFPGVSEFGKESILFHYTDWVDDQRPENYREALGDVVGDYNFICPALEFTKKFSEWGNNAFFYYFEHRSSKLPWPEWMGVGHGYEIEFVFGLPLERRDNYTKAEEILSRSIVKRWANFAKYGNPNETQNNSTSWPVFKSTEQKYLTLNTESTRIMTKLRAQQCRFWTSFFPKVLEMTGNIDEAEWEWKAGFHRWNNYMMDWKNQFNDYTSKKESCVGL

SEQ ID NO: 145 - DNA, 1722 bp, Artificial
  Synthetic butyrylcholinesterase variant
gaagatgacatcataattgcaacaaagaatggaaaagtcagagggatgaacttgacagtttttggtggcacggtaacagcctttcttggaattccctatgcacagccacctcttggtagacttcgattcaaaaagccacagtctctgaccaagtggtctgatatttggaatgccacaaaatatgcaaattcttgctgtcagaacatagatcaaagttttccaggcttccatggatcagagatgtggaacccaaacactgacctcagtgaagactgtttatatctaaatgtatggattccagcacctaaaccaaaaaatgccactgtattgatatggatttatggtggtggttttcaaactggaacatcatctttacatgtttatgatggcaagtttctggctcgggttgaaagagttattgtagtgtcaatgaactatagggtgggtgccctaggattcttagctttgccaggaaatcctgaggctccagggaacatgggtttatttgatcaacagttggctcttcagtgggttcaaaaaaatatagcagcctttggtggaaatcctaaaagtgtaactctctttggagaaagtgcaggagcagcttcagttagcctgcatttgctttctcctggaagccattcattgttcaccagagccattctgcaaagtggttccgckaatgctccttgggcggtaacatctctttatgaagctaggaacagaacgttgaacttagctaaattgactggttgctctagagagaatgagactgaaataatcaagtgtcttagaaataaagatccccaagaaattcttctgaatgaagcatttgttgtcccctatgggactcctttgtcagtaaactttggtccgaccgtggatggtgattttctcactgacatgccagacatattacttgaacttggacaatttaaaaaaacccagattttggtgggtgttaataaagatgaagggacagcttttttagtctatggtgctcctggcttcagcaaagataacaatagtatcataactagaaaagaatttcaggaaggtttaaaaatattttttccaggagtgagtgagtttggaaaggaatccatcctttttcattacacagactgggtagatgatcagagacctgaaaactaccgtgaggccttgggtgatgttgttggggattataatttcatatgccctgccttggagttcaccaagaagttctcagaatggggaaataatgcctttttctactattttgaacaccgatcctccaaacttccgtggccagaatggatgggagtgattcatggctatgaaattgaatttgtctttggtttacctctggaaagaagagataattacacaaaagccgaggaaattttgagtagatccatagtgaaacggtgggcaaattttgcaaaatatgggaatccaaatgagactcagaacaatagcacaagctggcctgtcttcaaaagcactgaacaaaaatatctaaccttgaatacagagtcaacaagaataatgacgaaactacgtgctcaacaatgtcgattctggacatcattttttccaaaagtcttggaaatgacaggaaatattgatgaagcagaatgggagtggaaagcaggattccatcgctggaacaattacatgatggactggaaaaatcaatttaacgattacactagcaagaaagaaagttgtgtgggtctc

SEQ ID NO: 146 - protein, 574 aa, Artificial
  Synthetic butyrylcholinesterase variant
  VARIANT (227)..(227): Xaa = Ala
  VARIANT (437)..(437): M437I
EDDIIIATKNGKVRGMNLTVFGGTVTAFLGIPYAQPPLGRLRFKKPQSLTKWSDIWNATKYANSCCQNIDQSFPGFHGSEMWNPNTDLSEDCLYLNVWIPAPKPKNATVLIWIYGGGFQTGTSSLHVYDGKFLARVERVIVVSMNYRVGALGFLALPGNPEAPGNMGLFDQQLALQWVQKNIAAFGGNPKSVTLFGESAGAASVSLHLLSPGSHSLFTRAILQSGSXNAPWAVTSLYEARNRTLNLAKLTGCSRENETEIIKCLRNKDPQEILLNEAFVVPYGTPLSVNFGPTVDGDFLTDMPDILLELGQFKKTQILVGVNKDEGTAFLVYGAPGFSKDNNSIITRKEFQEGLKIFFPGVSEFGKESILFHYTDWVDDQRPENYREALGDVVGDYNFICPALEFTKKFSEWGNNAFFYYFEHRSSKLPWPEWMGVIHGYEIEFVFGLPLERRDNYTKAEEILSRSIVKRWANFAKYGNPNETQNNSTSWPVFKSTEQKYLTLNTESTRIMTKLRAQQCRFWTSFFPKVLEMTGNIDEAEWEWKAGFHRWNNYMMDWKNQFNDYTSKKESCVGL

SEQ ID NO: 147 - DNA, 1722 bp, Artificial
  Synthetic butyrylcholinesterase variant
gaagatgacatcataattgcaacaaagaatggaaaagtcagagggatgaacttgacagtttttggtggcacggtaacagcctttcttggaattccctatgcacagccacctcttggtagacttcgattcaaaaagccacagtctctgaccaagtggtctgatatttggaatgccacaaaatatgcaaattcttgctgtcagaacatagatcaaagttttccaggcttccatggatcagagatgtggaacccaaacactgacctcagtgaagactgtttatatctaaatgtatggattccagcacctaaaccaaaaaatgccactgtattgatatggatttatggtggtggttttcaaactggaacatcatctttacatgtttatgatggcaagtttctggctcgggttgaaagagttattgtagtgtcaatgaactatagggtgggtgccctaggattcttagctttgccaggaaatcctgaggctccagggaacatgggtttatttgatcaacagttggctcttcagtgggttcaaaaaaatatagcagcctttggtggaaatcctaaaagtgtaactctctttggagaaagtgcaggagcagcttcagttagcctgcatttgctttctcctggaagccattcattgttcaccagagccattctgcaaagtggttccgckaatgctccttgggcggtaacatctctttatgaagctaggaacagaacgttgaacttagctaaattgactggttgctctagagagaatgagactgaaataatcaagtgtcttagaaataaagatccccaagaaattcttctgaatgaagcatttgttgtcccctatgggactcctttgtcagtaaactttggtccgaccgtggatggtgattttctcactgacatgccagacatattacttgaacttggacaatttaaaaaaacccagattttggtgggtgttaataaagatgaagggacagcttttttagtctatggtgctcctggcttcagcaaagataacaatagtatcataactagaaaagaatttcaggaaggtttaaaaatattttttccaggagtgagtgagtttggaaaggaatccatcctttttcattacacagactgggtagatgatcagagacctgaaaactaccgtgaggccttgggtgatgttgttggggattataatttcatatgccctgccttggagttcaccaagaagttctcagaatggggaaataatgcctttttctactattttgaacaccgatcctccaaacttccgtggccagaatggatgggagtgatgcatacgtatgaaattgaatttgtctttggtttacctctggaaagaagagataattacacaaaagccgaggaaattttgagtagatccatagtgaaacggtgggcaaattttgcaaaatatgggaatccaaatgagactcagaacaatagcacaagctggcctgtcttcaaaagcactgaacaaaaatatctaaccttgaatacagagtcaacaagaataatgacgaaactacgtgctcaacaatgtcgattctggacatcattttttccaaaagtcttggaaatgacaggaaatattgatgaagcagaatgggagtggaaagcaggattccatcgctggaacaattacatgatggactggaaaaatcaatttaacgattacactagcaagaaagaaagttgtgtgggtctc

SEQ ID NO: 148 - protein, 574 aa, Artificial
  Synthetic butyrylcholinesterase variant
  VARIANT (227)..(227): Xaa = Ala
  VARIANT (439)..(439): G439T
EDDIIIATKNGKVRGMNLTVFGGTVTAFLGIPYAQPPLGRLRFKKPQSLTKWSDIWNATKYANSCCQNIDQSFPGFHGSEMWNPNTDLSEDCLYLNVWIPAPKPKNATVLIWIYGGGFQTGTSSLHVYDGKFLARVERVIVVSMNYRVGALGFLALPGNPEAPGNMGLFDQQLALQWVQKNIAAFGGNPKSVTLFGESAGAASVSLHLLSPGSHSLFTRAILQSGSXNAPWAVTSLYEARNRTLNLAKLTGCSRENETEIIKCLRNKDPQEILLNEAFVVPYGTPLSVNFGPTVDGDFLTDMPDILLELGQFKKTQILVGVNKDEGTAFLVYGAPGFSKDNNSIITRKEFQEGLKIFFPGVSEFGKESILFHYTDWVDDQRPENYREALGDVVGDYNFICPALEFTKKFSEWGNNAFFYYFEHRSSKLPWPEWMGVMHTYEIEFVFGLPLERRDNYTKAEEILSRSIVKRWANFAKYGNPNETQNNSTSWPVFKSTEQKYLTLNTESTRIMTKLRAQQCRFWTSFFPKVLEMTGNIDEAEWEWKAGFHRWNNYMMDWKNQFNDYTSKKESCVGL

SEQ ID NO: 149 - DNA, 1722 bp, Artificial
  Synthetic butyrylcholinesterase variant
gaagatgacatcataattgcaacaaagaatggaaaagtcagagggatgaacttgacagtttttggtggcacggtaacagcctttcttggaattccctatgcacagccacctcttggtagacttcgattcaaaaagccacagtctctgaccaagtggtctgatatttggaatgccacaaaatatgcaaattcttgctgtcagaacatagatcaaagttttccaggcttccatggatcagagatgtggaacccaaacactgacctcagtgaagactgtttatatctaaatgtatggattccagcacctaaaccaaaaaatgccactgtattgatatggatttatggtggtggttttcaaactggaacatcatctttacatgtttatgatggcaagtttctggctcgggttgaaagagttattgtagtgtcaatgaactatagggtgggtgccctaggattcttagctttgccaggaaatcctgaggctccagggaacatgggtttatttgatcaacagttggctcttcagtgggttcaaaaaaatatagcagcctttggtggaaatcctaaaagtgtaactctctttggagaaagtgcaggagcagcttcagttagcctgcatttgctttctcctggaagccattcattgttcaccagagccattctgcaaagtggttccgckaatgctccttgggcggtaacatctctttatgaagctaggaacagaacgttgaacttagctaaattgactggttgctctagagagaatgagactgaaataatcaagtgtcttagaaataaagatccccaagaaattcttctgaatgaagcatttgttgtcccctatgggactcctttgtcagtaaactttggtccgaccgtggatggtgattttctcactgacatgccagacatattacttgaacttggacaatttaaaaaaacccagattttggtgggtgttaataaagatgaagggacagcttttttagtctatggtgctcctggcttcagcaaagataacaatagtatcataactagaaaagaatttcaggaaggtttaaaaatattttttccaggagtgagtgagtttggaaaggaatccatcctttttcattacacagactgggtagatgatcagagacctgaaaactaccgtgaggccttgggtgatgttgttggggattataatttcatatgccctgccttggagttcaccaagaagttctcagaatggggaaataatgcctttttctactattttgaacaccgatcctccaaacttccgtggccagaatggatgggagtgatgcatggcgctgaaattgaatttgtctttggtttacctctggaaagaagagataattacacaaaagccgaggaaattttgagtagatccatagtgaaacggtgggcaaattttgcaaaatatgggaatccaaatgagactcagaacaatagcacaagctggcctgtcttcaaaagcactgaacaaaaatatctaaccttgaatacagagtcaacaagaataatgacgaaactacgtgctcaacaatgtcgattctggacatcattttttccaaaagtcttggaaatgacaggaaatattgatgaagcagaatgggagtggaaagcaggattccatcgctggaacaattacatgatggactggaaaaatcaatttaacgattacactagcaagaaagaaagttgtgtgggtctc

SEQ ID NO: 150 - protein, 574 aa, Artificial
  Synthetic butyrylcholinesterase variant
  VARIANT (227)..(227): Xaa = Ala
  VARIANT (440)..(440): Y440A
EDDIIIATKNGKVRGMNLTVFGGTVTAFLGIPYAQPPLGRLRFKKPQSLTKWSDIWNATKYANSCCQNIDQSFPGFHGSEMWNPNTDLSEDCLYLNVWIPAPKPKNATVLIWIYGGGFQTGTSSLHVYDGKFLARVERVIVVSMNYRVGALGFLALPGNPEAPGNMGLFDQQLALQWVQKNIAAFGGNPKSVTLFGESAGAASVSLHLLSPGSHSLFTRAILQSGSXNAPWAVTSLYEARNRTLNLAKLTGCSRENETEIIKCLRNKDPQEILLNEAFVVPYGTPLSVNFGPTVDGDFLTDMPDILLELGQFKKTQILVGVNKDEGTAFLVYGAPGFSKDNNSIITRKEFQEGLKIFFPGVSEFGKESILFHYTDWVDDQRPENYREALGDVVGDYNFICPALEFTKKFSEWGNNAFFYYFEHRSSKLPWPEWMGVMHGAEIEFVFGLPLERRDNYTKAEEILSRSIVKRWANFAKYGNPNETQNNSTSWPVFKSTEQKYLTLNTESTRIMTKLRAQQCRFWTSFFPKVLEMTGNIDEAEWEWKAGFHRWNNYMMDWKNQFNDYTSKKESCVGL

SEQ ID NO: 151 - DNA, 1722 bp, Artificial
  Synthetic butyrylcholinesterase variant
gaagatgacatcataattgcaacaaagaatggaaaagtcagagggatgaacttgacagtttttggtggcacggtaacagcctttcttggaattccctatgcacagccacctcttggtagacttcgattcaaaaagccacagtctctgaccaagtggtctgatatttggaatgccacaaaatatgcaaattcttgctgtcagaacatagatcaaagttttccaggcttccatggatcagagatgtggaacccaaacactgacctcagtgaagactgtttatatctaaatgtatggattccagcacctaaaccaaaaaatgccactgtattgatatggatttatggtggtggttttcaaactggaacatcatctttacatgtttatgatggcaagtttctggctcgggttgaaagagttattgtagtgtcaatgaactatagggtgggtgccctaggattcttagctttgccaggaaatcctgaggctccagggaacatgggtttatttgatcaacagttggctcttcagtgggttcaaaaaaatatagcagcctttggtggaaatcctaaaagtgtaactctctttggagaaagtgcaggagcagcttcagttagcctgcatttgctttctcctggaagccattcattgttcaccagagccattctgcaaagtggttccgckaatgctccttgggcggtaacatctctttatgaagctaggaacagaacgttgaacttagctaaattgactggttgctctagagagaatgagactgaaataatcaagtgtcttagaaataaagatccccaagaaattcttctgaatgaagcatttgttgtcccctatgggactcctttgtcagtaaactttggtccgaccgtggatggtgattttctcactgacatgccagacatattacttgaacttggacaatttaaaaaaacccagattttggtgggtgttaataaagatgaagggacagcttttttagtctatggtgctcctggcttcagcaaagataacaatagtatcataactagaaaagaatttcaggaaggtttaaaaatattttttccaggagtgagtgagtttggaaaggaatccatcctttttcattacacagactgggtagatgatcagagacctgaaaactaccgtgaggccttgggtgatgttgttggggattataatttcatatgccctgccttggagttcaccaagaagttctcagaatggggaaataatgcctttttctactattttgaacaccgatcctccaaacttccgtggccagaatggatgggagtgatgcatggcgaggaaattgaatttgtctttggtttacctctggaaagaagagataattacacaaaagccgaggaaattttgagtagatccatagtgaaacggtgggcaaattttgcaaaatatgggaatccaaatgagactcagaacaatagcacaagctggcctgtcttcaaaagcactgaacaaaaatatctaaccttgaatacagagtcaacaagaataatgacgaaactacgtgctcaacaatgtcgattctggacatcattttttccaaaagtcttggaaatgacaggaaatattgatgaagcagaatgggagtggaaagcaggattccatcgctggaacaattacatgatggactggaaaaatcaatttaacgattacactagcaagaaagaaagttgtgtgggtctc

SEQ ID NO: 152 - protein, 574 aa, Artificial
  Synthetic butyrylcholinesterase variant
  VARIANT (227)..(227): Xaa = Ala
  VARIANT (440)..(440): Y440E
EDDIIIATKNGKVRGMNLTVFGGTVTAFLGIPYAQPPLGRLRFKKPQSLTKWSDIWNATKYANSCCQNIDQSFPGFHGSEMWNPNTDLSEDCLYLNVWIPAPKPKNATVLIWIYGGGFQTGTSSLHVYDGKFLARVERVIVVSMNYRVGALGFLALPGNPEAPGNMGLFDQQLALQWVQKNIAAFGGNPKSVTLFGESAGAASVSLHLLSPGSHSLFTRAILQSGSXNAPWAVTSLYEARNRTLNLAKLTGCSRENETEIIKCLRNKDPQEILLNEAFVVPYGTPLSVNFGPTVDGDFLTDMPDILLELGQFKKTQILVGVNKDEGTAFLVYGAPGFSKDNNSIITRKEFQEGLKIFFPGVSEFGKESILFHYTDWVDDQRPENYREALGDVVGDYNFICPALEFTKKFSEWGNNAFFYYFEHRSSKLPWPEWMGVMHGEEIEFVFGLPLERRDNYTKAEEILSRSIVKRWANFAKYGNPNETQNNSTSWPVFKSTEQKYLTLNTESTRIMTKLRAQQCRFWTSFFPKVLEMTGNIDEAEWEWKAGFHRWNNYMMDWKNQFNDYTSKKESCVGL

SEQ ID NO: 153 - DNA, 1722 bp, Artificial
  Synthetic butyrylcholinesterase variant
gaagatgacatcataattgcaacaaagaatggaaaagtcagagggatgaacttgacagtttttggtggcacggtaacagcctttcttggaattccctatgcacagccacctcttggtagacttcgattcaaaaagccacagtctctgaccaagtggtctgatatttggaatgccacaaaatatgcaaattcttgctgtcagaacatagatcaaagttttccaggcttccatggatcagagatgtggaacccaaacactgacctcagtgaagactgtttatatctaaatgtatggattccagcacctaaaccaaaaaatgccactgtattgatatggatttatggtggtggttttcaaactggaacatcatctttacatgtttatgatggcaagtttctggctcgggttgaaagagttattgtagtgtcaatgaactatagggtgggtgccctaggattcttagctttgccaggaaatcctgaggctccagggaacatgggtttatttgatcaacagttggctcttcagtgggttcaaaaaaatatagcagcctttggtggaaatcctaaaagtgtaactctctttggagaaagtgcaggagcagcttcagttagcctgcatttgctttctcctggaagccattcattgttcaccagagccattctgcaaagtggttccgckaatgctccttgggcggtaacatctctttatgaagctaggaacagaacgttgaacttagctaaattgactggttgctctagagagaatgagactgaaataatcaagtgtcttagaaataaagatccccaagaaattcttctgaatgaagcatttgttgtcccctatgggactcctttgtcagtaaactttggtccgaccgtggatggtgattttctcactgacatgccagacatattacttgaacttggacaatttaaaaaaacccagattttggtgggtgttaataaagatgaagggacagcttttttagtctatggtgctcctggcttcagcaaagataacaatagtatcataactagaaaagaatttcaggaaggtttaaaaatattttttccaggagtgagtgagtttggaaaggaatccatcctttttcattacacagactgggtagatgatcagagacctgaaaactaccgtgaggccttgggtgatgttgttggggattataatttcatatgccctgccttggagttcaccaagaagttctcagaatggggaaataatgcctttttctactattttgaacaccgatcctccaaacttccgtggccagaatggatgggagtgatgcatggctttgaaattgaatttgtctttggtttacctctggaaagaagagataattacacaaaagccgaggaaattttgagtagatccatagtgaaacggtgggcaaattttgcaaaatatgggaatccaaatgagactcagaacaatagcacaagctggcctgtcttcaaaagcactgaacaaaaatatctaaccttgaatacagagtcaacaagaataatgacgaaactacgtgctcaacaatgtcgattctggacatcattttttccaaaagtcttggaaatgacaggaaatattgatgaagcagaatgggagtggaaagcaggattccatcgctggaacaattacatgatggactggaaaaatcaatttaacgattacactagcaagaaagaaagttgtgtgggtctc

SEQ ID NO: 154 - protein, 574 aa, Artificial
  Synthetic butyrylcholinesterase variant
  VARIANT (227)..(227): Xaa = Ala
  VARIANT (440)..(440): Y440F
EDDIIIATKNGKVRGMNLTVFGGTVTAFLGIPYAQPPLGRLRFKKPQSLTKWSDIWNATKYANSCCQNIDQSFPGFHGSEMWNPNTDLSEDCLYLNVWIPAPKPKNATVLIWIYGGGFQTGTSSLHVYDGKFLARVERVIVVSMNYRVGALGFLALPGNPEAPGNMGLFDQQLALQWVQKNIAAFGGNPKSVTLFGESAGAASVSLHLLSPGSHSLFTRAILQSGSXNAPWAVTSLYEARNRTLNLAKLTGCSRENETEIIKCLRNKDPQEILLNEAFVVPYGTPLSVNFGPTVDGDFLTDMPDILLELGQFKKTQILVGVNKDEGTAFLVYGAPGFSKDNNSIITRKEFQEGLKIFFPGVSEFGKESILFHYTDWVDDQRPENYREALGDVVGDYNFICPALEFTKKFSEWGNNAFFYYFEHRSSKLPWPEWMGVMHGFEIEFVFGLPLERRDNYTKAEEILSRSIVKRWANFAKYGNPNETQNNSTSWPVFKSTEQKYLTLNTESTRIMTKLRAQQCRFWTSFFPKVLEMTGNIDEAEWEWKAGFHRWNNYMMDWKNQFNDYTSKKESCVGL

SEQ ID NO: 155 - DNA, 1722 bp, Artificial
  Synthetic butyrylcholinesterase variant
gaagatgacatcataattgcaacaaagaatggaaaagtcagagggatgaacttgacagtttttggtggcacggtaacagcctttcttggaattccctatgcacagccacctcttggtagacttcgattcaaaaagccacagtctctgaccaagtggtctgatatttggaatgccacaaaatatgcaaattcttgctgtcagaacatagatcaaagttttccaggcttccatggatcagagatgtggaacccaaacactgacctcagtgaagactgtttatatctaaatgtatggattccagcacctaaaccaaaaaatgccactgtattgatatggatttatggtggtggttttcaaactggaacatcatctttacatgtttatgatggcaagtttctggctcgggttgaaagagttattgtagtgtcaatgaactatagggtgggtgccctaggattcttagctttgccaggaaatcctgaggctccagggaacatgggtttatttgatcaacagttggctcttcagtgggttcaaaaaaatatagcagcctttggtggaaatcctaaaagtgtaactctctttggagaaagtgcaggagcagcttcagttagcctgcatttgctttctcctggaagccattcattgttcaccagagccattctgcaaagtggttccgckaatgctccttgggcggtaacatctctttatgaagctaggaacagaacgttgaacttagctaaattgactggttgctctagagagaatgagactgaaataatcaagtgtcttagaaataaagatccccaagaaattcttctgaatgaagcatttgttgtcccctatgggactcctttgtcagtaaactttggtccgaccgtggatggtgattttctcactgacatgccagacatattacttgaacttggacaatttaaaaaaacccagattttggtgggtgttaataaagatgaagggacagcttttttagtctatggtgctcctggcttcagcaaagataacaatagtatcataactagaaaagaatttcaggaaggtttaaaaatattttttccaggagtgagtgagtttggaaaggaatccatcctttttcattacacagactgggtagatgatcagagacctgaaaactaccgtgaggccttgggtgatgttgttggggattataatttcatatgccctgccttggagttcaccaagaagttctcagaatggggaaataatgcctttttctactattttgaacaccgatcctccaaacttccgtggccagaatggatgggagtgatgcatggcggtgaaattgaatttgtctttggtttacctctggaaagaagagataattacacaaaagccgaggaaattttgagtagatccatagtgaaacggtgggcaaattttgcaaaatatgggaatccaaatgagactcagaacaatagcacaagctggcctgtcttcaaaagcactgaacaaaaatatctaaccttgaatacagagtcaacaagaataatgacgaaactacgtgctcaacaatgtcgattctggacatcattttttccaaaagtcttggaaatgacaggaaatattgatgaagcagaatgggagtggaaagcaggattccatcgctggaacaattacatgatggactggaaaaatcaatttaacgattacactagcaagaaagaaagttgtgtgggtctc

SEQ ID NO: 156 - protein, 574 aa, Artificial
  Synthetic butyrylcholinesterase variant
  VARIANT (227)..(227): Xaa = Ala
  VARIANT (440)..(440): Y440G
EDDIIIATKNGKVRGMNLTVFGGTVTAFLGIPYAQPPLGRLRFKKPQSLTKWSDIWNATKYANSCCQNIDQSFPGFHGSEMWNPNTDLSEDCLYLNVWIPAPKPKNATVLIWIYGGGFQTGTSSLHVYDGKFLARVERVIVVSMNYRVGALGFLALPGNPEAPGNMGLFDQQLALQWVQKNIAAFGGNPKSVTLFGESAGAASVSLHLLSPGSHSLFTRAILQSGSXNAPWAVTSLYEARNRTLNLAKLTGCSRENETEIIKCLRNKDPQEILLNEAFVVPYGTPLSVNFGPTVDGDFLTDMPDILLELGQFKKTQILVGVNKDEGTAFLVYGAPGFSKDNNSIITRKEFQEGLKIFFPGVSEFGKESILFHYTDWVDDQRPENYREALGDVVGDYNFICPALEFTKKFSEWGNNAFFYYFEHRSSKLPWPEWMGVMHGGEIEFVFGLPLERRDNYTKAEEILSRSIVKRWANFAKYGNPNETQNNSTSWPVFKSTEQKYLTLNTESTRIMTKLRAQQCRFWTSFFPKVLEMTGNIDEAEWEWKAGFHRWNNYMMDWKNQFNDYTSKKESCVGL

SEQ ID NO: 157 - DNA, 1722 bp, Artificial
  Synthetic butyrylcholinesterase variant
gaagatgacatcataattgcaacaaagaatggaaaagtcagagggatgaacttgacagtttttggtggcacggtaacagcctttcttggaattccctatgcacagccacctcttggtagacttcgattcaaaaagccacagtctctgaccaagtggtctgatatttggaatgccacaaaatatgcaaattcttgctgtcagaacatagatcaaagttttccaggcttccatggatcagagatgtggaacccaaacactgacctcagtgaagactgtttatatctaaatgtatggattccagcacctaaaccaaaaaatgccactgtattgatatggatttatggtggtggttttcaaactggaacatcatctttacatgtttatgatggcaagtttctggctcgggttgaaagagttattgtagtgtcaatgaactatagggtgggtgccctaggattcttagctttgccaggaaatcctgaggctccagggaacatgggtttatttgatcaacagttggctcttcagtgggttcaaaaaaatatagcagcctttggtggaaatcctaaaagtgtaactctctttggagaaagtgcaggagcagcttcagttagcctgcatttgctttctcctggaagccattcattgttcaccagagccattctgcaaagtggttccgckaatgctccttgggcggtaacatctctttatgaagctaggaacagaacgttgaacttagctaaattgactggttgctctagagagaatgagactgaaataatcaagtgtcttagaaataaagatccccaagaaattcttctgaatgaagcatttgttgtcccctatgggactcctttgtcagtaaactttggtccgaccgtggatggtgattttctcactgacatgccagacatattacttgaacttggacaatttaaaaaaacccagattttggtgggtgttaataaagatgaagggacagcttttttagtctatggtgctcctggcttcagcaaagataacaatagtatcataactagaaaagaatttcaggaaggtttaaaaatattttttccaggagtgagtgagtttggaaaggaatccatcctttttcattacacagactgggtagatgatcagagacctgaaaactaccgtgaggccttgggtgatgttgttggggattataatttcatatgccctgccttggagttcaccaagaagttctcagaatggggaaataatgcctttttctactattttgaacaccgatcctccaaacttccgtggccagaatggatgggagtgatgcatggccatgaaattgaatttgtctttggtttacctctggaaagaagagataattacacaaaagccgaggaaattttgagtagatccatagtgaaacggtgggcaaattttgcaaaatatgggaatccaaatgagactcagaacaatagcacaagctggcctgtcttcaaaagcactgaacaaaaatatctaaccttgaatacagagtcaacaagaataatgacgaaactacgtgctcaacaatgtcgattctggacatcattttttccaaaagtcttggaaatgacaggaaatattgatgaagcagaatgggagtggaaagcaggattccatcgctggaacaattacatgatggactggaaaaatcaatttaacgattacactagcaagaaagaaagttgtgtgggtctc

SEQ ID NO: 158 - protein, 574 aa, Artificial
  Synthetic butyrylcholinesterase variant
  VARIANT (227)..(227): Xaa = Ala
  VARIANT (440)..(440): Y440H
EDDIIIATKNGKVRGMNLTVFGGTVTAFLGIPYAQPPLGRLRFKKPQSLTKWSDIWNATKYANSCCQNIDQSFPGFHGSEMWNPNTDLSEDCLYLNVWIPAPKPKNATVLIWIYGGGFQTGTSSLHVYDGKFLARVERVIVVSMNYRVGALGFLALPGNPEAPGNMGLFDQQLALQWVQKNIAAFGGNPKSVTLFGESAGAASVSLHLLSPGSHSLFTRAILQSGSXNAPWAVTSLYEARNRTLNLAKLTGCSRENETEIIKCLRNKDPQEILLNEAFVVPYGTPLSVNFGPTVDGDFLTDMPDILLELGQFKKTQILVGVNKDEGTAFLVYGAPGFSKDNNSIITRKEFQEGLKIFFPGVSEFGKESILFHYTDWVDDQRPENYREALGDVVGDYNFICPALEFTKKFSEWGNNAFFYYFEHRSSKLPWPEWMGVMHGHEIEFVFGLPLERRDNYTKAEEILSRSIVKRWANFAKYGNPNETQNNSTSWPVFKSTEQKYLTLNTESTRIMTKLRAQQCRFWTSFFPKVLEMTGNIDEAEWEWKAGFHRWNNYMMDWKNQFNDYTSKKESCVGL

SEQ ID NO: 159 - DNA, 1722 bp, Artificial
  Synthetic butyrylcholinesterase variant
gaagatgacatcataattgcaacaaagaatggaaaagtcagagggatgaacttgacagtttttggtggcacggtaacagcctttcttggaattccctatgcacagccacctcttggtagacttcgattcaaaaagccacagtctctgaccaagtggtctgatatttggaatgccacaaaatatgcaaattcttgctgtcagaacatagatcaaagttttccaggcttccatggatcagagatgtggaacccaaacactgacctcagtgaagactgtttatatctaaatgtatggattccagcacctaaaccaaaaaatgccactgtattgatatggatttatggtggtggttttcaaactggaacatcatctttacatgtttatgatggcaagtttctggctcgggttgaaagagttattgtagtgtcaatgaactatagggtgggtgccctaggattcttagctttgccaggaaatcctgaggctccagggaacatgggtttatttgatcaacagttggctcttcagtgggttcaaaaaaatatagcagcctttggtggaaatcctaaaagtgtaactctctttggagaaagtgcaggagcagcttcagttagcctgcatttgctttctcctggaagccattcattgttcaccagagccattctgcaaagtggttccgckaatgctccttgggcggtaacatctctttatgaagctaggaacagaacgttgaacttagctaaattgactggttgctctagagagaatgagactgaaataatcaagtgtcttagaaataaagatccccaagaaattcttctgaatgaagcatttgttgtcccctatgggactcctttgtcagtaaactttggtccgaccgtggatggtgattttctcactgacatgccagacatattacttgaacttggacaatttaaaaaaacccagattttggtgggtgttaataaagatgaagggacagcttttttagtctatggtgctcctggcttcagcaaagataacaatagtatcataactagaaaagaatttcaggaaggtttaaaaatattttttccaggagtgagtgagtttggaaaggaatccatcctttttcattacacagactgggtagatgatcagagacctgaaaactaccgtgaggccttgggtgatgttgttggggattataatttcatatgccctgccttggagttcaccaagaagttctcagaatggggaaataatgcctttttctactattttgaacaccgatcctccaaacttccgtggccagaatggatgggagtgatgcatggcttggaaattgaatttgtctttggtttacctctggaaagaagagataattacacaaaagccgaggaaattttgagtagatccatagtgaaacggtgggcaaattttgcaaaatatgggaatccaaatgagactcagaacaatagcacaagctggcctgtcttcaaaagcactgaacaaaaatatctaaccttgaatacagagtcaacaagaataatgacgaaactacgtgctcaacaatgtcgattctggacatcattttttccaaaagtcttggaaatgacaggaaatattgatgaagcagaatgggagtggaaagcaggattccatcgctggaacaattacatgatggactggaaaaatcaatttaacgattacactagcaagaaagaaagttgtgtgggtctc

SEQ ID NO: 160 - protein, 574 aa, Artificial
  Synthetic butyrylcholinesterase variant
  VARIANT (227)..(227): Xaa = Ala
  VARIANT (440)..(440): Y440L
EDDIIIATKNGKVRGMNLTVFGGTVTAFLGIPYAQPPLGRLRFKKPQSLTKWSDIWNATKYANSCCQNIDQSFPGFHGSEMWNPNTDLSEDCLYLNVWIPAPKPKNATVLIWIYGGGFQTGTSSLHVYDGKFLARVERVIVVSMNYRVGALGFLALPGNPEAPGNMGLFDQQLALQWVQKNIAAFGGNPKSVTLFGESAGAASVSLHLLSPGSHSLFTRAILQSGSXNAPWAVTSLYEARNRTLNLAKLTGCSRENETEIIKCLRNKDPQEILLNEAFVVPYGTPLSVNFGPTVDGDFLTDMPDILLELGQFKKTQILVGVNKDEGTAFLVYGAPGFSKDNNSIITRKEFQEGLKIFFPGVSEFGKESILFHYTDWVDDQRPENYREALGDVVGDYNFICPALEFTKKFSEWGNNAFFYYFEHRSSKLPWPEWMGVMHGLEIEFVFGLPLERRDNYTKAEEILSRSIVKRWANFAKYGNPNETQNNSTSWPVFKSTEQKYLTLNTESTRIMTKLRAQQCRFWTSFFPKVLEMTGNIDEAEWEWKAGFHRWNNYMMDWKNQFNDYTSKKESCVGL

SEQ ID NO: 161 - DNA, 1722 bp, Artificial
  Synthetic butyrylcholinesterase variant
gaagatgacatcataattgcaacaaagaatggaaaagtcagagggatgaacttgacagtttttggtggcacggtaacagcctttcttggaattccctatgcacagccacctcttggtagacttcgattcaaaaagccacagtctctgaccaagtggtctgatatttggaatgccacaaaatatgcaaattcttgctgtcagaacatagatcaaagttttccaggcttccatggatcagagatgtggaacccaaacactgacctcagtgaagactgtttatatctaaatgtatggattccagcacctaaaccaaaaaatgccactgtattgatatggatttatggtggtggttttcaaactggaacatcatctttacatgtttatgatggcaagtttctggctcgggttgaaagagttattgtagtgtcaatgaactatagggtgggtgccctaggattcttagctttgccaggaaatcctgaggctccagggaacatgggtttatttgatcaacagttggctcttcagtgggttcaaaaaaatatagcagcctttggtggaaatcctaaaagtgtaactctctttggagaaagtgcaggagcagcttcagttagcctgcatttgctttctcctggaagccattcattgttcaccagagccattctgcaaagtggttccgckaatgctccttgggcggtaacatctctttatgaagctaggaacagaacgttgaacttagctaaattgactggttgctctagagagaatgagactgaaataatcaagtgtcttagaaataaagatccccaagaaattcttctgaatgaagcatttgttgtcccctatgggactcctttgtcagtaaactttggtccgaccgtggatggtgattttctcactgacatgccagacatattacttgaacttggacaatttaaaaaaacccagattttggtgggtgttaataaagatgaagggacagcttttttagtctatggtgctcctggcttcagcaaagataacaatagtatcataactagaaaagaatttcaggaaggtttaaaaatattttttccaggagtgagtgagtttggaaaggaatccatcctttttcattacacagactgggtagatgatcagagacctgaaaactaccgtgaggccttgggtgatgttgttggggattataatttcatatgccctgccttggagttcaccaagaagttctcagaatggggaaataatgcctttttctactattttgaacaccgatcctccaaacttccgtggccagaatggatgggagtgatgcatggcatggaaattgaatttgtctttggtttacctctggaaagaagagataattacacaaaagccgaggaaattttgagtagatccatagtgaaacggtgggcaaattttgcaaaatatgggaatccaaatgagactcagaacaatagcacaagctggcctgtcttcaaaagcactgaacaaaaatatctaaccttgaatacagagtcaacaagaataatgacgaaactacgtgctcaacaatgtcgattctggacatcattttttccaaaagtcttggaaatgacaggaaatattgatgaagcagaatgggagtggaaagcaggattccatcgctggaacaattacatgatggactggaaaaatcaatttaacgattacactagcaagaaagaaagttgtgtgggtctc

SEQ ID NO: 162 - protein, 574 aa, Artificial
  Synthetic butyrylcholinesterase variant
  VARIANT (227)..(227): Xaa = Ala
  VARIANT (440)..(440): Y440M
EDDIIIATKNGKVRGMNLTVFGGTVTAFLGIPYAQPPLGRLRFKKPQSLTKWSDIWNATKYANSCCQNIDQSFPGFHGSEMWNPNTDLSEDCLYLNVWIPAPKPKNATVLIWIYGGGFQTGTSSLHVYDGKFLARVERVIVVSMNYRVGALGFLALPGNPEAPGNMGLFDQQLALQWVQKNIAAFGGNPKSVTLFGESAGAASVSLHLLSPGSHSLFTRAILQSGSXNAPWAVTSLYEARNRTLNLAKLTGCSRENETEIIKCLRNKDPQEILLNEAFVVPYGTPLSVNFGPTVDGDFLTDMPDILLELGQFKKTQILVGVNKDEGTAFLVYGAPGFSKDNNSIITRKEFQEGLKIFFPGVSEFGKESILFHYTDWVDDQRPENYREALGDVVGDYNFICPALEFTKKFSEWGNNAFFYYFEHRSSKLPWPEWMGVMHGMEIEFVFGLPLERRDNYTKAEEILSRSIVKRWANFAKYGNPNETQNNSTSWPVFKSTEQKYLTLNTESTRIMTKLRAQQCRFWTSFFPKVLEMTGNIDEAEWEWKAGFHRWNNYMMDWKNQFNDYTSKKESCVGL

SEQ ID NO: 163 - DNA, 1722 bp, Artificial
  Synthetic butyrylcholinesterase variant
gaagatgacatcataattgcaacaaagaatggaaaagtcagagggatgaacttgacagtttttggtggcacggtaacagcctttcttggaattccctatgcacagccacctcttggtagacttcgattcaaaaagccacagtctctgaccaagtggtctgatatttggaatgccacaaaatatgcaaattcttgctgtcagaacatagatcaaagttttccaggcttccatggatcagagatgtggaacccaaacactgacctcagtgaagactgtttatatctaaatgtatggattccagcacctaaaccaaaaaatgccactgtattgatatggatttatggtggtggttttcaaactggaacatcatctttacatgtttatgatggcaagtttctggctcgggttgaaagagttattgtagtgtcaatgaactatagggtgggtgccctaggattcttagctttgccaggaaatcctgaggctccagggaacatgggtttatttgatcaacagttggctcttcagtgggttcaaaaaaatatagcagcctttggtggaaatcctaaaagtgtaactctctttggagaaagtgcaggagcagcttcagttagcctgcatttgctttctcctggaagccattcattgttcaccagagccattctgcaaagtggttccgckaatgctccttgggcggtaacatctctttatgaagctaggaacagaacgttgaacttagctaaattgactggttgctctagagagaatgagactgaaataatcaagtgtcttagaaataaagatccccaagaaattcttctgaatgaagcatttgttgtcccctatgggactcctttgtcagtaaactttggtccgaccgtggatggtgattttctcactgacatgccagacatattacttgaacttggacaatttaaaaaaacccagattttggtgggtgttaataaagatgaagggacagcttttttagtctatggtgctcctggcttcagcaaagataacaatagtatcataactagaaaagaatttcaggaaggtttaaaaatattttttccaggagtgagtgagtttggaaaggaatccatcctttttcattacacagactgggtagatgatcagagacctgaaaactaccgtgaggccttgggtgatgttgttggggattataatttcatatgccctgccttggagttcaccaagaagttctcagaatggggaaataatgcctttttctactattttgaacaccgatcctccaaacttccgtggccagaatggatgggagtgatgcatggcaatgaaattgaatttgtctttggtttacctctggaaagaagagataattacacaaaagccgaggaaattttgagtagatccatagtgaaacggtgggcaaattttgcaaaatatgggaatccaaatgagactcagaacaatagcacaagctggcctgtcttcaaaagcactgaacaaaaatatctaaccttgaatacagagtcaacaagaataatgacgaaactacgtgctcaacaatgtcgattctggacatcattttttccaaaagtcttggaaatgacaggaaatattgatgaagcagaatgggagtggaaagcaggattccatcgctggaacaattacatgatggactggaaaaatcaatttaacgattacactagcaagaaagaaagttgtgtgggtctc

SEQ ID NO: 164 - protein, 574 aa, Artificial
  Synthetic butyrylcholinesterase variant
  VARIANT (227)..(227): Xaa = Ala
  VARIANT (440)..(440): Y440N
EDDIIIATKNGKVRGMNLTVFGGTVTAFLGIPYAQPPLGRLRFKKPQSLTKWSDIWNATKYANSCCQNIDQSFPGFHGSEMWNPNTDLSEDCLYLNVWIPAPKPKNATVLIWIYGGGFQTGTSSLHVYDGKFLARVERVIVVSMNYRVGALGFLALPGNPEAPGNMGLFDQQLALQWVQKNIAAFGGNPKSVTLFGESAGAASVSLHLLSPGSHSLFTRAILQSGSXNAPWAVTSLYEARNRTLNLAKLTGCSRENETEIIKCLRNKDPQEILLNEAFVVPYGTPLSVNFGPTVDGDFLTDMPDILLELGQFKKTQILVGVNKDEGTAFLVYGAPGFSKDNNSIITRKEFQEGLKIFFPGVSEFGKESILFHYTDWVDDQRPENYREALGDVVGDYNFICPALEFTKKFSEWGNNAFFYYFEHRSSKLPWPEWMGVMHGNEIEFVFGLPLERRDNYTKAEEILSRSIVKRWANFAKYGNPNETQNNSTSWPVFKSTEQKYLTLNTESTRIMTKLRAQQCRFWTSFFPKVLEMTGNIDEAEWEWKAGFHRWNNYMMDWKNQFNDYTSKKESCVGL

SEQ ID NO: 165 - DNA, 1722 bp, Artificial
  Synthetic butyrylcholinesterase variant
gaagatgacatcataattgcaacaaagaatggaaaagtcagagggatgaacttgacagtttttggtggcacggtaacagcctttcttggaattccctatgcacagccacctcttggtagacttcgattcaaaaagccacagtctctgaccaagtggtctgatatttggaatgccacaaaatatgcaaattcttgctgtcagaacatagatcaaagttttccaggcttccatggatcagagatgtggaacccaaacactgacctcagtgaagactgtttatatctaaatgtatggattccagcacctaaaccaaaaaatgccactgtattgatatggatttatggtggtggttttcaaactggaacatcatctttacatgtttatgatggcaagtttctggctcgggttgaaagagttattgtagtgtcaatgaactatagggtgggtgccctaggattcttagctttgccaggaaatcctgaggctccagggaacatgggtttatttgatcaacagttggctcttcagtgggttcaaaaaaatatagcagcctttggtggaaatcctaaaagtgtaactctctttggagaaagtgcaggagcagcttcagttagcctgcatttgctttctcctggaagccattcattgttcaccagagccattctgcaaagtggttccgckaatgctccttgggcggtaacatctctttatgaagctaggaacagaacgttgaacttagctaaattgactggttgctctagagagaatgagactgaaataatcaagtgtcttagaaataaagatccccaagaaattcttctgaatgaagcatttgttgtcccctatgggactcctttgtcagtaaactttggtccgaccgtggatggtgattttctcactgacatgccagacatattacttgaacttggacaatttaaaaaaacccagattttggtgggtgttaataaagatgaagggacagcttttttagtctatggtgctcctggcttcagcaaagataacaatagtatcataactagaaaagaatttcaggaaggtttaaaaatattttttccaggagtgagtgagtttggaaaggaatccatcctttttcattacacagactgggtagatgatcagagacctgaaaactaccgtgaggccttgggtgatgttgttggggattataatttcatatgccctgccttggagttcaccaagaagttctcagaatggggaaataatgcctttttctactattttgaacaccgatcctccaaacttccgtggccagaatggatgggagtgatgcatggccaggaaattgaatttgtctttggtttacctctggaaagaagagataattacacaaaagccgaggaaattttgagtagatccatagtgaaacggtgggcaaattttgcaaaatatgggaatccaaatgagactcagaacaatagcacaagctggcctgtcttcaaaagcactgaacaaaaatatctaaccttgaatacagagtcaacaagaataatgacgaaactacgtgctcaacaatgtcgattctggacatcattttttccaaaagtcttggaaatgacaggaaatattgatgaagcagaatgggagtggaaagcaggattccatcgctggaacaattacatgatggactggaaaaatcaatttaacgattacactagcaagaaagaaagttgtgtgggtctc

SEQ ID NO: 166 - protein, 574 aa, Artificial
  Synthetic butyrylcholinesterase variant
  VARIANT (227)..(227): Xaa = Ala
  VARIANT (440)..(440): Y440Q
EDDIIIATKNGKVRGMNLTVFGGTVTAFLGIPYAQPPLGRLRFKKPQSLTKWSDIWNATKYANSCCQNIDQSFPGFHGSEMWNPNTDLSEDCLYLNVWIPAPKPKNATVLIWIYGGGFQTGTSSLHVYDGKFLARVERVIVVSMNYRVGALGFLALPGNPEAPGNMGLFDQQLALQWVQKNIAAFGGNPKSVTLFGESAGAASVSLHLLSPGSHSLFTRAILQSGSXNAPWAVTSLYEARNRTLNLAKLTGCSRENETEIIKCLRNKDPQEILLNEAFVVPYGTPLSVNFGPTVDGDFLTDMPDILLELGQFKKTQILVGVNKDEGTAFLVYGAPGFSKDNNSIITRKEFQEGLKIFFPGVSEFGKESILFHYTDWVDDQRPENYREALGDVVGDYNFICPALEFTKKFSEWGNNAFFYYFEHRSSKLPWPEWMGVMHGQEIEFVFGLPLERRDNYTKAEEILSRSIVKRWANFAKYGNPNETQNNSTSWPVFKSTEQKYLTLNTESTRIMTKLRAQQCRFWTSFFPKVLEMTGNIDEAEWEWKAGFHRWNNYMMDWKNQFNDYTSKKESCVGL

SEQ ID NO: 167 - DNA, 1722 bp, Artificial
  Synthetic butyrylcholinesterase variant
gaagatgacatcataattgcaacaaagaatggaaaagtcagagggatgaacttgacagtttttggtggcacggtaacagcctttcttggaattccctatgcacagccacctcttggtagacttcgattcaaaaagccacagtctctgaccaagtggtctgatatttggaatgccacaaaatatgcaaattcttgctgtcagaacatagatcaaagttttccaggcttccatggatcagagatgtggaacccaaacactgacctcagtgaagactgtttatatctaaatgtatggattccagcacctaaaccaaaaaatgccactgtattgatatggatttatggtggtggttttcaaactggaacatcatctttacatgtttatgatggcaagtttctggctcgggttgaaagagttattgtagtgtcaatgaactatagggtgggtgccctaggattcttagctttgccaggaaatcctgaggctccagggaacatgggtttatttgatcaacagttggctcttcagtgggttcaaaaaaatatagcagcctttggtggaaatcctaaaagtgtaactctctttggagaaagtgcaggagcagcttcagttagcctgcatttgctttctcctggaagccattcattgttcaccagagccattctgcaaagtggttccgckaatgctccttgggcggtaacatctctttatgaagctaggaacagaacgttgaacttagctaaattgactggttgctctagagagaatgagactgaaataatcaagtgtcttagaaataaagatccccaagaaattcttctgaatgaagcatttgttgtcccctatgggactcctttgtcagtaaactttggtccgaccgtggatggtgattttctcactgacatgccagacatattacttgaacttggacaatttaaaaaaacccagattttggtgggtgttaataaagatgaagggacagcttttttagtctatggtgctcctggcttcagcaaagataacaatagtatcataactagaaaagaatttcaggaaggtttaaaaatattttttccaggagtgagtgagtttggaaaggaatccatcctttttcattacacagactgggtagatgatcagagacctgaaaactaccgtgaggccttgggtgatgttgttggggattataatttcatatgccctgccttggagttcaccaagaagttctcagaatggggaaataatgcctttttctactattttgaacaccgatcctccaaacttccgtggccagaatggatgggagtgatgcatggcagggaaattgaatttgtctttggtttacctctggaaagaagagataattacacaaaagccgaggaaattttgagtagatccatagtgaaacggtgggcaaattttgcaaaatatgggaatccaaatgagactcagaacaatagcacaagctggcctgtcttcaaaagcactgaacaaaaatatctaaccttgaatacagagtcaacaagaataatgacgaaactacgtgctcaacaatgtcgattctggacatcattttttccaaaagtcttggaaatgacaggaaatattgatgaagcagaatgggagtggaaagcaggattccatcgctggaacaattacatgatggactggaaaaatcaatttaacgattacactagcaagaaagaaagttgtgtgggtctc

SEQ ID NO: 168 - protein, 574 aa, Artificial
  Synthetic butyrylcholinesterase variant
  VARIANT (227)..(227): Xaa = Ala
  VARIANT (440)..(440): Y440R
EDDIIIATKNGKVRGMNLTVFGGTVTAFLGIPYAQPPLGRLRFKKPQSLTKWSDIWNATKYANSCCQNIDQSFPGFHGSEMWNPNTDLSEDCLYLNVWIPAPKPKNATVLIWIYGGGFQTGTSSLHVYDGKFLARVERVIVVSMNYRVGALGFLALPGNPEAPGNMGLFDQQLALQWVQKNIAAFGGNPKSVTLFGESAGAASVSLHLLSPGSHSLFTRAILQSGSXNAPWAVTSLYEARNRTLNLAKLTGCSRENETEIIKCLRNKDPQEILLNEAFVVPYGTPLSVNFGPTVDGDFLTDMPDILLELGQFKKTQILVGVNKDEGTAFLVYGAPGFSKDNNSIITRKEFQEGLKIFFPGVSEFGKESILFHYTDWVDDQRPENYREALGDVVGDYNFICPALEFTKKFSEWGNNAFFYYFEHRSSKLPWPEWMGVMHGREIEFVFGLPLERRDNYTKAEEILSRSIVKRWANFAKYGNPNETQNNSTSWPVFKSTEQKYLTLNTESTRIMTKLRAQQCRFWTSFFPKVLEMTGNIDEAEWEWKAGFHRWNNYMMDWKNQFNDYTSKKESCVGL

SEQ ID NO: 169 - DNA, 1722 bp, Artificial
  Synthetic butyrylcholinesterase variant
gaagatgacatcataattgcaacaaagaatggaaaagtcagagggatgaacttgacagtttttggtggcacggtaacagcctttcttggaattccctatgcacagccacctcttggtagacttcgattcaaaaagccacagtctctgaccaagtggtctgatatttggaatgccacaaaatatgcaaattcttgctgtcagaacatagatcaaagttttccaggcttccatggatcagagatgtggaacccaaacactgacctcagtgaagactgtttatatctaaatgtatggattccagcacctaaaccaaaaaatgccactgtattgatatggatttatggtggtggttttcaaactggaacatcatctttacatgtttatgatggcaagtttctggctcgggttgaaagagttattgtagtgtcaatgaactatagggtgggtgccctaggattcttagctttgccaggaaatcctgaggctccagggaacatgggtttatttgatcaacagttggctcttcagtgggttcaaaaaaatatagcagcctttggtggaaatcctaaaagtgtaactctctttggagaaagtgcaggagcagcttcagttagcctgcatttgctttctcctggaagccattcattgttcaccagagccattctgcaaagtggttccgckaatgctccttgggcggtaacatctctttatgaagctaggaacagaacgttgaacttagctaaattgactggttgctctagagagaatgagactgaaataatcaagtgtcttagaaataaagatccccaagaaattcttctgaatgaagcatttgttgtcccctatgggactcctttgtcagtaaactttggtccgaccgtggatggtgattttctcactgacatgccagacatattacttgaacttggacaatttaaaaaaacccagattttggtgggtgttaataaagatgaagggacagcttttttagtctatggtgctcctggcttcagcaaagataacaatagtatcataactagaaaagaatttcaggaaggtttaaaaatattttttccaggagtgagtgagtttggaaaggaatccatcctttttcattacacagactgggtagatgatcagagacctgaaaactaccgtgaggccttgggtgatgttgttggggattataatttcatatgccctgccttggagttcaccaagaagttctcagaatggggaaataatgcctttttctactattttgaacaccgatcctccaaacttccgtggccagaatggatgggagtgatgcatggctctgaaattgaatttgtctttggtttacctctggaaagaagagataattacacaaaagccgaggaaattttgagtagatccatagtgaaacggtgggcaaattttgcaaaatatgggaatccaaatgagactcagaacaatagcacaagctggcctgtcttcaaaagcactgaacaaaaatatctaaccttgaatacagagtcaacaagaataatgacgaaactacgtgctcaacaatgtcgattctggacatcattttttccaaaagtcttggaaatgacaggaaatattgatgaagcagaatgggagtggaaagcaggattccatcgctggaacaattacatgatggactggaaaaatcaatttaacgattacactagcaagaaagaaagttgtgtgggtctc

SEQ ID NO: 170 - protein, 574 aa, Artificial
  Synthetic butyrylcholinesterase variant
  VARIANT (227)..(227): Xaa = Ala
  VARIANT (440)..(440): Y440S
EDDIIIATKNGKVRGMNLTVFGGTVTAFLGIPYAQPPLGRLRFKKPQSLTKWSDIWNATKYANSCCQNIDQSFPGFHGSEMWNPNTDLSEDCLYLNVWIPAPKPKNATVLIWIYGGGFQTGTSSLHVYDGKFLARVERVIVVSMNYRVGALGFLALPGNPEAPGNMGLFDQQLALQWVQKNIAAFGGNPKSVTLFGESAGAASVSLHLLSPGSHSLFTRAILQSGSXNAPWAVTSLYEARNRTLNLAKLTGCSRENETEIIKCLRNKDPQEILLNEAFVVPYGTPLSVNFGPTVDGDFLTDMPDILLELGQFKKTQILVGVNKDEGTAFLVYGAPGFSKDNNSIITRKEFQEGLKIFFPGVSEFGKESILFHYTDWVDDQRPENYREALGDVVGDYNFICPALEFTKKFSEWGNNAFFYYFEHRSSKLPWPEWMGVMHGSEIEFVFGLPLERRDNYTKAEEILSRSIVKRWANFAKYGNPNETQNNSTSWPVFKSTEQKYLTLNTESTRIMTKLRAQQCRFWTSFFPKVLEMTGNIDEAEWEWKAGFHRWNNYMMDWKNQFNDYTSKKESCVGL

SEQ ID NO: 171 - DNA, 1722 bp, Artificial
  Synthetic butyrylcholinesterase variant
gaagatgacatcataattgcaacaaagaatggaaaagtcagagggatgaacttgacagtttttggtggcacggtaacagcctttcttggaattccctatgcacagccacctcttggtagacttcgattcaaaaagccacagtctctgaccaagtggtctgatatttggaatgccacaaaatatgcaaattcttgctgtcagaacatagatcaaagttttccaggcttccatggatcagagatgtggaacccaaacactgacctcagtgaagactgtttatatctaaatgtatggattccagcacctaaaccaaaaaatgccactgtattgatatggatttatggtggtggttttcaaactggaacatcatctttacatgtttatgatggcaagtttctggctcgggttgaaagagttattgtagtgtcaatgaactatagggtgggtgccctaggattcttagctttgccaggaaatcctgaggctccagggaacatgggtttatttgatcaacagttggctcttcagtgggttcaaaaaaatatagcagcctttggtggaaatcctaaaagtgtaactctctttggagaaagtgcaggagcagcttcagttagcctgcatttgctttctcctggaagccattcattgttcaccagagccattctgcaaagtggttccgckaatgctccttgggcggtaacatctctttatgaagctaggaacagaacgttgaacttagctaaattgactggttgctctagagagaatgagactgaaataatcaagtgtcttagaaataaagatccccaagaaattcttctgaatgaagcatttgttgtcccctatgggactcctttgtcagtaaactttggtccgaccgtggatggtgattttctcactgacatgccagacatattacttgaacttggacaatttaaaaaaacccagattttggtgggtgttaataaagatgaagggacagcttttttagtctatggtgctcctggcttcagcaaagataacaatagtatcataactagaaaagaatttcaggaaggtttaaaaatattttttccaggagtgagtgagtttggaaaggaatccatcctttttcattacacagactgggtagatgatcagagacctgaaaactaccgtgaggccttgggtgatgttgttggggattataatttcatatgccctgccttggagttcaccaagaagttctcagaatggggaaataatgcctttttctactattttgaacaccgatcctccaaacttccgtggccagaatggatgggagtgatgcatggcactgaaattgaatttgtctttggtttacctctggaaagaagagataattacacaaaagccgaggaaattttgagtagatccatagtgaaacggtgggcaaattttgcaaaatatgggaatccaaatgagactcagaacaatagcacaagctggcctgtcttcaaaagcactgaacaaaaatatctaaccttgaatacagagtcaacaagaataatgacgaaactacgtgctcaacaatgtcgattctggacatcattttttccaaaagtcttggaaatgacaggaaatattgatgaagcagaatgggagtggaaagcaggattccatcgctggaacaattacatgatggactggaaaaatcaatttaacgattacactagcaagaaagaaagttgtgtgggtctc

SEQ ID NO: 172 - protein, 574 aa, Artificial
  Synthetic butyrylcholinesterase variant
  VARIANT (227)..(227): Xaa = Ala
  VARIANT (440)..(440): Y440T
EDDIIIATKNGKVRGMNLTVFGGTVTAFLGIPYAQPPLGRLRFKKPQSLTKWSDIWNATKYANSCCQNIDQSFPGFHGSEMWNPNTDLSEDCLYLNVWIPAPKPKNATVLIWIYGGGFQTGTSSLHVYDGKFLARVERVIVVSMNYRVGALGFLALPGNPEAPGNMGLFDQQLALQWVQKNIAAFGGNPKSVTLFGESAGAASVSLHLLSPGSHSLFTRAILQSGSXNAPWAVTSLYEARNRTLNLAKLTGCSRENETEIIKCLRNKDPQEILLNEAFVVPYGTPLSVNFGPTVDGDFLTDMPDILLELGQFKKTQILVGVNKDEGTAFLVYGAPGFSKDNNSIITRKEFQEGLKIFFPGVSEFGKESILFHYTDWVDDQRPENYREALGDVVGDYNFICPALEFTKKFSEWGNNAFFYYFEHRSSKLPWPEWMGVMHGTEIEFVFGLPLERRDNYTKAEEILSRSIVKRWANFAKYGNPNETQNNSTSWPVFKSTEQKYLTLNTESTRIMTKLRAQQCRFWTSFFPKVLEMTGNIDEAEWEWKAGFHRWNNYMMDWKNQFNDYTSKKESCVGL

SEQ ID NO: 173 - DNA, 1722 bp, Artificial
  Synthetic butyrylcholinesterase variant
gaagatgacatcataattgcaacaaagaatggaaaagtcagagggatgaacttgacagtttttggtggcacggtaacagcctttcttggaattccctatgcacagccacctcttggtagacttcgattcaaaaagccacagtctctgaccaagtggtctgatatttggaatgccacaaaatatgcaaattcttgctgtcagaacatagatcaaagttttccaggcttccatggatcagagatgtggaacccaaacactgacctcagtgaagactgtttatatctaaatgtatggattccagcacctaaaccaaaaaatgccactgtattgatatggatttatggtggtggttttcaaactggaacatcatctttacatgtttatgatggcaagtttctggctcgggttgaaagagttattgtagtgtcaatgaactatagggtgggtgccctaggattcttagctttgccaggaaatcctgaggctccagggaacatgggtttatttgatcaacagttggctcttcagtgggttcaaaaaaatatagcagcctttggtggaaatcctaaaagtgtaactctctttggagaaagtgcaggagcagcttcagttagcctgcatttgctttctcctggaagccattcattgttcaccagagccattctgcaaagtggttccgckaatgctccttgggcggtaacatctctttatgaagctaggaacagaacgttgaacttagctaaattgactggttgctctagagagaatgagactgaaataatcaagtgtcttagaaataaagatccccaagaaattcttctgaatgaagcatttgttgtcccctatgggactcctttgtcagtaaactttggtccgaccgtggatggtgattttctcactgacatgccagacatattacttgaacttggacaatttaaaaaaacccagattttggtgggtgttaataaagatgaagggacagcttttttagtctatggtgctcctggcttcagcaaagataacaatagtatcataactagaaaagaatttcaggaaggtttaaaaatattttttccaggagtgagtgagtttggaaaggaatccatcctttttcattacacagactgggtagatgatcagagacctgaaaactaccgtgaggccttgggtgatgttgttggggattataatttcatatgccctgccttggagttcaccaagaagttctcagaatggggaaataatgcctttttctactattttgaacaccgatcctccaaacttccgtggccagaatggatgggagtgatgcatggctatactattgaatttgtctttggtttacctctggaaagaagagataattacacaaaagccgaggaaattttgagtagatccatagtgaaacggtgggcaaattttgcaaaatatgggaatccaaatgagactcagaacaatagcacaagctggcctgtcttcaaaagcactgaacaaaaatatctaaccttgaatacagagtcaacaagaataatgacgaaactacgtgctcaacaatgtcgattctggacatcattttttccaaaagtcttggaaatgacaggaaatattgatgaagcagaatgggagtggaaagcaggattccatcgctggaacaattacatgatggactggaaaaatcaatttaacgattacactagcaagaaagaaagttgtgtgggtctc

SEQ ID NO: 174 - protein, 574 aa, Artificial
  Synthetic butyrylcholinesterase variant
  VARIANT (227)..(227): Xaa = Ala
  VARIANT (441)..(441): E441T
EDDIIIATKNGKVRGMNLTVFGGTVTAFLGIPYAQPPLGRLRFKKPQSLTKWSDIWNATKYANSCCQNIDQSFPGFHGSEMWNPNTDLSEDCLYLNVWIPAPKPKNATVLIWIYGGGFQTGTSSLHVYDGKFLARVERVIVVSMNYRVGALGFLALPGNPEAPGNMGLFDQQLALQWVQKNIAAFGGNPKSVTLFGESAGAASVSLHLLSPGSHSLFTRAILQSGSXNAPWAVTSLYEARNRTLNLAKLTGCSRENETEIIKCLRNKDPQEILLNEAFVVPYGTPLSVNFGPTVDGDFLTDMPDILLELGQFKKTQILVGVNKDEGTAFLVYGAPGFSKDNNSIITRKEFQEGLKIFFPGVSEFGKESILFHYTDWVDDQRPENYREALGDVVGDYNFICPALEFTKKFSEWGNNAFFYYFEHRSSKLPWPEWMGVMHGYTIEFVFGLPLERRDNYTKAEEILSRSIVKRWANFAKYGNPNETQNNSTSWPVFKSTEQKYLTLNTESTRIMTKLRAQQCRFWTSFFPKVLEMTGNIDEAEWEWKAGFHRWNNYMMDWKNQFNDYTSKKESCVGL

SEQ ID NO: 175 - DNA, 1722 bp, Artificial
  Synthetic butyrylcholinesterase variant
gaagatgacatcataattgcaacaaagaatggaaaagtcagagggatgaacttgacagtttttggtggcacggtaacagcctttcttggaattccctatgcacagccacctcttggtagacttcgattcaaaaagccacagtctctgaccaagtggtctgatatttggaatgccacaaaatatgcaaattcttgctgtcagaacatagatcaaagttttccaggcttccatggatcagagatgtggaacccaaacactgacctcagtgaagactgtttatatctaaatgtatggattccagcacctaaaccaaaaaatgccactgtattgatatggatttatggtggtggttttcaaactggaacatcatctttacatgtttatgatggcaagtttctggctcgggttgaaagagttattgtagtgtcaatgaactatagggtgggtgccctaggattcttagctttgccaggaaatcctgaggctccagggaacatgggtttatttgatcaacagttggctcttcagtgggttcaaaaaaatatagcagcctttggtggaaatcctaaaagtgtaactctctttggagaaagtgcaggagcagcttcagttagcctgcatttgctttctcctggaagccattcattgttcaccagagccattctgcaaagtggttccgckaatgctccttgggcggtaacatctctttatgaagctaggaacagaacgttgaacttagctaaattgactggttgctctagagagaatgagactgaaataatcaagtgtcttagaaataaagatccccaagaaattcttctgaatgaagcatttgttgtcccctatgggactcctttgtcagtaaactttggtccgaccgtggatggtgattttctcactgacatgccagacatattacttgaacttggacaatttaaaaaaacccagattttggtgggtgttaataaagatgaagggacagcttttttagtctatggtgctcctggcttcagcaaagataacaatagtatcataactagaaaagaatttcaggaaggtttaaaaatattttttccaggagtgagtgagtttggaaaggaatccatcctttttcattacacagactgggtagatgatcagagacctgaaaactaccgtgaggccttgggtgatgttgttggggattataatttcatatgccctgccttggagttcaccaagaagttctcagaatggggaaataatgcctttttctactattttgaacaccgatcctccaaacttccgtggccagaatggatgggagtgatgcatggctatgaactggaatttgtctttggtttacctctggaaagaagagataattacacaaaagccgaggaaattttgagtagatccatagtgaaacggtgggcaaattttgcaaaatatgggaatccaaatgagactcagaacaatagcacaagctggcctgtcttcaaaagcactgaacaaaaatatctaaccttgaatacagagtcaacaagaataatgacgaaactacgtgctcaacaatgtcgattctggacatcattttttccaaaagtcttggaaatgacaggaaatattgatgaagcagaatgggagtggaaagcaggattccatcgctggaacaattacatgatggactggaaaaatcaatttaacgattacactagcaagaaagaaagttgtgtgggtctc

SEQ ID NO: 176 - protein, 574 aa, Artificial
  Synthetic butyrylcholinesterase variant
  VARIANT (227)..(227): Xaa = Ala
  VARIANT (442)..(442): I442L
EDDIIIATKNGKVRGMNLTVFGGTVTAFLGIPYAQPPLGRLRFKKPQSLTKWSDIWNATKYANSCCQNIDQSFPGFHGSEMWNPNTDLSEDCLYLNVWIPAPKPKNATVLIWIYGGGFQTGTSSLHVYDGKFLARVERVIVVSMNYRVGALGFLALPGNPEAPGNMGLFDQQLALQWVQKNIAAFGGNPKSVTLFGESAGAASVSLHLLSPGSHSLFTRAILQSGSXNAPWAVTSLYEARNRTLNLAKLTGCSRENETEIIKCLRNKDPQEILLNEAFVVPYGTPLSVNFGPTVDGDFLTDMPDILLELGQFKKTQILVGVNKDEGTAFLVYGAPGFSKDNNSIITRKEFQEGLKIFFPGVSEFGKESILFHYTDWVDDQRPENYREALGDVVGDYNFICPALEFTKKFSEWGNNAFFYYFEHRSSKLPWPEWMGVMHGYELEFVFGLPLERRDNYTKAEEILSRSIVKRWANFAKYGNPNETQNNSTSWPVFKSTEQKYLTLNTESTRIMTKLRAQQCRFWTSFFPKVLEMTGNIDEAEWEWKAGFHRWNNYMMDWKNQFNDYTSKKESCVGL

SEQ ID NO: 177 - DNA, 1722 bp, Artificial
  Synthetic butyrylcholinesterase variant
gaagatgacatcataattgcaacaaagaatggaaaagtcagagggatgaacttgacagtttttggtggcacggtaacagcctttcttggaattccctatgcacagccacctcttggtagacttcgattcaaaaagccacagtctctgaccaagtggtctgatatttggaatgccacaaaatatgcaaattcttgctgtcagaagatagatcaaagttttccaggcttctttggatcagagatgtggaacccaaacactgacctcagtgaagactgtttatatctaaatgtatggattccagcacctaaaccaaaaaatgccactgtattgatatggatttatggtggtggttttcaaactggaacatcatctttacatgtttatgatggcaagtttctggctcgggttgaaagagttattgtagtgtcaatgaactatagggtgggtgccctaggattcttagctttgccaggaaatcctgaggctccagggaacatgggtttatttgatcaacagttggctcttcagtgggttcaaaaaaatatagcagcctttggtggaaatcctaaaagtgtaactctctttggagaaagtgcaggagcagcttcagttagcctgcatttgctttctcctggaagccattcattgttcaccagagccattctgcaaagtggttccgckaatgctccttgggcggtaacatctctttatgaagctaggaacagaacgttgaacttagctaaattgactggttgctctagagagaatgagactgaaataatcaagtgtcttagaaataaagatccccaagaaattcttctgaatgaagcatttgttgtcccctatgggactaatttgtcagtaaactttggtccgaccgtggatggtgattttctcactgacatgccagacatattacttgaacttggacaatttaaaaaaacccagattttggtgggtgttaataaagatgaagggacagcttttttagcgtatggtgctcctggcttcagcaaagataacaatagtatcataactagaaaagaatttcaggaaggtttaaaaatattttttccaggagtgagtgagtttggaaaggaatccatcctttttcattacacagactgggtagatgatcagagacctgaaaactaccgtgaggccttgggtgatgttgttggggattataatttcatatgccctgccttggagttcaccaagaagttctcagaatggggaaataatgcctttttctactattttgaacaccgatcctccaaacttccgtggccagaatggatgggagtgatgcatggctatgaaattgaatttgtctttggtttacctctggaaagaagagataattacacaaaagccgaggaaattttgagtagatccatagtgaaacggtgggcaaattttgcaaaatatgggaatccaaatgagactcagaacaatagcacaagctggcctgtcttcaaaagcactgaacaaaaatatctaaccttgaatacagagtcaacaagaataatgacgaaactacgtgctcaacaatgtcgattctggacatcattttttccaaaagtcttggaaatgacaggaaatattgatgaagcagaatgggagtggaaagcaggattccatcgctggaacaattacatgatggactggaaaaatcaatttaacgattacactagcaagaaagaaagttgtgtgggtctc

SEQ ID NO: 178 - protein, 574 aa, Artificial
  Synthetic butyrylcholinesterase variant
  VARIANT (68)..(68): N68K
  VARIANT (77)..(77): H77F
  VARIANT (227)..(227): Xaa = Ala
  VARIANT (285)..(285): P285N
  VARIANT (331)..(331): V331A
EDDIIIATKNGKVRGMNLTVFGGTVTAFLGIPYAQPPLGRLRFKKPQSLTKWSDIWNATKYANSCCQKIDQSFPGFFGSEMWNPNTDLSEDCLYLNVWIPAPKPKNATVLIWIYGGGFQTGTSSLHVYDGKFLARVERVIVVSMNYRVGALGFLALPGNPEAPGNMGLFDQQLALQWVQKNIAAFGGNPKSVTLFGESAGAASVSLHLLSPGSHSLFTRAILQSGSXNAPWAVTSLYEARNRTLNLAKLTGCSRENETEIIKCLRNKDPQEILLNEAFVVPYGTNLSVNFGPTVDGDFLTDMPDILLELGQFKKTQILVGVNKDEGTAFLAYGAPGFSKDNNSIITRKEFQEGLKIFFPGVSEFGKESILFHYTDWVDDQRPENYREALGDVVGDYNFICPALEFTKKFSEWGNNAFFYYFEHRSSKLPWPEWMGVMHGYEIEFVFGLPLERRDNYTKAEEILSRSIVKRWANFAKYGNPNETQNNSTSWPVFKSTEQKYLTLNTESTRIMTKLRAQQCRFWTSFFPKVLEMTGNIDEAEWEWKAGFHRWNNYMMDWKNQFNDYTSKKESCVGL

SEQ ID NO: 179 - DNA, 1722 bp, Artificial
  Synthetic butyrylcholinesterase variant
gaagatgacatcataattgcaacaaagaatggaaaagtcagagggatgaacttgacagtttttggtggcacggtaacagcctttcttggaattccctatgcacagccacctcttggtagacttcgattcaaaaagccacagtctctgaccaagtggtctgatatttggaatgccacaaaatatgcaaattcttgctgtcagaacatagatcaaagttttccaggcttctttggatcagagatgtggaacccaaacactgacctcagtgaagactgtttatatctaaatgtatggattccagcacctaaaccaaaaaatgccactgtattgatatggatttatggtggtggttttcaaactggaacatcatctttacatgtttatgatggcaagtttctggctcgggttgaaagagttattgtagtgtcaatgaactatagggtgggtgccctaggattcttagctttgccaggaaatcctgaggctccagggaacatgggtttatttgatcaacagttggctcttcagtgggttcaaaaaaatatagcagcctttggtggaaatcctaaaagtgtaactctctttggagaaagtgcaggagcagcttcagttagcctgcatttgctttctcctggaagccattcattgttcaccagagccattctgcaaagtggttccgckaatgctccttgggcggtaacatctctttatgaagctaggaacagaacgttgaacttagctaaattgactggttgctctagagagaatgagactgaaataatcaagtgtcttagaaataaagatccccaagaaattcttctgaatgaagcatttgttgtcccctatgggactaatttgtcagtaaactttggtccgaccgtggatggtgattttctcactgacatgccagacatattacttgaacttggacaatttaaaaaaacccagattttggtgggtgttaataaagatgaagggacagcttttttagcgtatggtgctcctggcttcagcaaagataacaatagtatcataactagaaaagaatttcaggaaggtttaaaaatattttttccaggagtgagtgagtttggaaaggaatccatcctttttcattacacagactgggtagatgatcagagacctgaaaactaccgtgaggccttgggtgatgttgttggggattataatttcatatgccctgccttggagttcaccaagaagttctcagaatggggaaataatgcctttttctactattttgaacaccgatcctccaaacttccgtggccagaatggatgggagtgatgcatggctatgaaattgaatttgtctttggtttacctctggaaagaagagataattacacaaaagccgaggaaattttgagtagatccatagtgaaacggtgggcaaattttgcaaaatatgggaatccaaatgagactcagaacaatagcacaagctggcctgtcttcaaaagcactgaacaaaaatatctaaccttgaatacagagtcaacaagaataatgacgaaactacgtgctcaacaatgtcgattctggacatcattttttccaaaagtcttggaaatgacaggaaatattgatgaagcagaatgggagtggaaagcaggattccatcgctggaacaattacatgatggactggaaaaatcaatttaacgattacactagcaagaaagaaagttgtgtgggtctc

SEQ ID NO: 180 - protein, 574 aa, Artificial
  Synthetic butyrylcholinesterase variant
  VARIANT (77)..(77): H77F
  VARIANT (227)..(227): Xaa = Ala
  VARIANT (285)..(285): P285N
  VARIANT (331)..(331): V331A
EDDIIIATKNGKVRGMNLTVFGGTVTAFLGIPYAQPPLGRLRFKKPQSLTKWSDIWNATKYANSCCQNIDQSFPGFFGSEMWNPNTDLSEDCLYLNVWIPAPKPKNATVLIWIYGGGFQTGTSSLHVYDGKFLARVERVIVVSMNYRVGALGFLALPGNPEAPGNMGLFDQQLALQWVQKNIAAFGGNPKSVTLFGESAGAASVSLHLLSPGSHSLFTRAILQSGSXNAPWAVTSLYEARNRTLNLAKLTGCSRENETEIIKCLRNKDPQEILLNEAFVVPYGTNLSVNFGPTVDGDFLTDMPDILLELGQFKKTQILVGVNKDEGTAFLAYGAPGFSKDNNSIITRKEFQEGLKIFFPGVSEFGKESILFHYTDWVDDQRPENYREALGDVVGDYNFICPALEFTKKFSEWGNNAFFYYFEHRSSKLPWPEWMGVMHGYEIEFVFGLPLERRDNYTKAEEILSRSIVKRWANFAKYGNPNETQNNSTSWPVFKSTEQKYLTLNTESTRIMTKLRAQQCRFWTSFFPKVLEMTGNIDEAEWEWKAGFHRWNNYMMDWKNQFNDYTSKKESCVGL

SEQ ID NO: 181 - DNA, 1722 bp, Artificial
  Synthetic butyrylcholinesterase variant
gaagatgacatcataattgcaacaaagaatggaaaagtcagagggatgaacttgacagtttttggtggcacggtaacagcctttcttggaattccctatgcacagccacctcttggtagacttcgattcaaaaagccacagtctctgaccaagtggtctgatatttggaatgccacaaaatatgcaaattcttgctgtcagaacatagatcaaagttttccaggcttctttggatcagagatgtggaacccaaacactgacctcagtgaagactgtttatatctaaatgtatggattccagcacctaaaccaaaaaatgccactgtattgatatggatttatggtggtggttttcaaactggaacatcatctttacatgtttatgatggcaagtttctggctcgggttgaaagagttattgtagtgtcaatgaactatagggtgggtgccctaggattcttagctttgccaggaaatcctgaggctccagggaacatgggtttatttgatcaacagttggctcttcagtgggttcaaaaaaatatagcagcctttggtggaaatcctaaaagtgtaactctctttggagaaagtgcaggagcagcttcagttagcctgcatttgctttctcctggaagccattcattgttcaccagagccattctgcaaagtggttccgckaatgctccttgggcggtaacatctctttatgaagctaggaacagaacgttgaacttagctaaattgactggttgctctagagagaatgagactgaaataatcaagtgtcttagaaataaagatccccaagaaattcttctgaatgaagcatttgttgtcccctatgggactaatttgtcagtaaactttggtccgaccgtggatggtgattttctcactgacatgccagacatattacttgaacttggacaatttaaaaaaacccagattttggtgggtgttaataaagatgaagggacagcttttttagcgtatggtgctcctggcttcagcaaagataacaatagtatcataactagaaaagaatttcaggaaggtttaaaaatattttttccaggagtgagtgagtttggaaaggaatccatcctttttcattacacagactgggtagatgatcagagacctgaaaactaccgtgaggccttgggtgatgttgttggggattataatttcatatgccctgccttggagttcaccaagaagttctcagaatggggaaataatgcctttttctactattttgaacaccgatcctccaaacttccgtggccagaatggctgggagtgatgcatggctatgaaattgaatttgtctttggtttacctctggaaagaagagataattacacaaaagccgaggaaattttgagtagatccatagtgaaacggtgggcaaattttgcaaaatatgggaatccaaatgagactcagaacaatagcacaagctggcctgtcttcaaaagcactgaacaaaaatatctaaccttgaatacagagtcaacaagaataatgacgaaactacgtgctcaacaatgtcgattctggacatcattttttccaaaagtcttggaaatgacaggaaatattgatgaagcagaatgggagtggaaagcaggattccatcgctggaacaattacatgatggactggaaaaatcaatttaacgattacactagcaagaaagaaagttgtgtgggtctc

SEQ ID NO: 182 - protein, 574 aa, Artificial
  Synthetic butyrylcholinesterase variant
  VARIANT (77)..(77): H77F
  VARIANT (227)..(227): Xaa = Ala
  VARIANT (285)..(285): P285N
  VARIANT (331)..(331): V331A
  VARIANT (434)..(434): M434L
EDDIIIATKNGKVRGMNLTVFGGTVTAFLGIPYAQPPLGRLRFKKPQSLTKWSDIWNATKYANSCCQNIDQSFPGFFGSEMWNPNTDLSEDCLYLNVWIPAPKPKNATVLIWIYGGGFQTGTSSLHVYDGKFLARVERVIVVSMNYRVGALGFLALPGNPEAPGNMGLFDQQLALQWVQKNIAAFGGNPKSVTLFGESAGAASVSLHLLSPGSHSLFTRAILQSGSXNAPWAVTSLYEARNRTLNLAKLTGCSRENETEIIKCLRNKDPQEILLNEAFVVPYGTNLSVNFGPTVDGDFLTDMPDILLELGQFKKTQILVGVNKDEGTAFLAYGAPGFSKDNNSIITRKEFQEGLKIFFPGVSEFGKESILFHYTDWVDDQRPENYREALGDVVGDYNFICPALEFTKKFSEWGNNAFFYYFEHRSSKLPWPEWLGVMHGYEIEFVFGLPLERRDNYTKAEEILSRSIVKRWANFAKYGNPNETQNNSTSWPVFKSTEQKYLTLNTESTRIMTKLRAQQCRFWTSFFPKVLEMTGNIDEAEWEWKAGFHRWNNYMMDWKNQFNDYTSKKESCVGL

SEQ ID NO: 183 - DNA, 1722 bp, Artificial
  Synthetic butyrylcholinesterase variant
gaagatgacatcataattgcaacaaagaatggaaaagtcagagggatgaacttgacagtttttggtggcacggtaacagcctttcttggaattccctatgcacagccacctcttggtagacttcgattcaaaaagccacagtctctgaccaagtggtctgatatttggaatgccacaaaatatgcaaattcttgctgtcagaacatagatcaaagttttccaggcttctttggatcagagatgtggaacccaaacactgacctcagtgaagactgtttatatctaaatgtatggattccagcacctaaaccaaaaaatgccactgtattgatatggatttatggtggtggttttcaaactggaacatcatctttacatgtttatgatggcaagtttctggctcgggttgaaagagttattgtagtgtcaatgaactatagggtgggtgccctaggattcttagctttgccaggaaatcctgaggctccagggaacatgggtttatttgatcaacagttggctcttcagtgggttcaaaaaaatatagcagcctttggtggaaatcctaaaagtgtaactctctttggagaaagtgcaggagcagcttcagttagcctgcatttgctttctcctggaagccattcattgttcaccagagccattctgcaaagtggttccgckaatgctccttgggcggtaacatctctttatgaagctaggaacagaacgttgaacttagctaaattgactggttgctctagagagaatgagactgaaataatcaagtgtcttagaaataaagatccccaagaaattcttctgaatgaagcatttgttgtcccctatgggactaatttgtcagtaaactttggtccgaccgtggatggtgattttctcactgacatgccagacatattacttgaacttggacaatttaaaaaaacccagattttggtgggtgttaataaagatgaagggacagcttttttagcgtatggtgctcctggcttcagcaaagataacaatagtatcataactagaaaagaatttcaggaaggtttaaaaatattttttccaggagtgagtgagtttggaaaggaatccatcctttttcattacacagactgggtagatgatcagagacctgaaaactaccgtgaggccttgggtgatgttgttggggattataatttcatatgccctgccttggagttcaccaagaagttctcagaatggggaaataatgcctttttctactattttgaacaccgatcctccaaacttcggtggccagaatggatgggagtgatgcatggctatgaaattgaatttgtctttggtttacctctggaaagaagagataattacacaaaagccgaggaaattttgagtagatccatagtgaaacggtgggcaaattttgcaaaatatgggaatccaaatgagactcagaacaatagcacaagctggcctgtcttcaaaagcactgaacaaaaatatctaaccttgaatacagagtcaacaagaataatgacgaaactacgtgctcaacaatgtcgattctggacatcattttttccaaaagtcttggaaatgacaggaaatattgatgaagcagaatgggagtggaaagcaggattccatcgctggaacaattacatgatggactggaaaaatcaatttaacgattacactagcaagaaagaaagttgtgtgggtctc

SEQ ID NO: 184 - protein, 574 aa, Artificial
  Synthetic butyrylcholinesterase variant
  VARIANT (77)..(77): H77F
  VARIANT (227)..(227): Xaa = Ala
  VARIANT (285)..(285): P285N
  VARIANT (331)..(331): V331A
  VARIANT (429)..(429): P429R
EDDIIIATKNGKVRGMNLTVFGGTVTAFLGIPYAQPPLGRLRFKKPQSLTKWSDIWNATKYANSCCQNIDQSFPGFFGSEMWNPNTDLSEDCLYLNVWIPAPKPKNATVLIWIYGGGFQTGTSSLHVYDGKFLARVERVIVVSMNYRVGALGFLALPGNPEAPGNMGLFDQQLALQWVQKNIAAFGGNPKSVTLFGESAGAASVSLHLLSPGSHSLFTRAILQSGSXNAPWAVTSLYEARNRTLNLAKLTGCSRENETEIIKCLRNKDPQEILLNEAFVVPYGTNLSVNFGPTVDGDFLTDMPDILLELGQFKKTQILVGVNKDEGTAFLAYGAPGFSKDNNSIITRKEFQEGLKIFFPGVSEFGKESILFHYTDWVDDQRPENYREALGDVVGDYNFICPALEFTKKFSEWGNNAFFYYFEHRSSKLRWPEWMGVMHGYEIEFVFGLPLERRDNYTKAEEILSRSIVKRWANFAKYGNPNETQNNSTSWPVFKSTEQKYLTLNTESTRIMTKLRAQQCRFWTSFFPKVLEMTGNIDEAEWEWKAGFHRWNNYMMDWKNQFNDYTSKKESCVGL

SEQ ID NO: 185 - DNA, 1722 bp, Artificial
  Synthetic butyrylcholinesterase variant
gaagatgacatcataattgcaacaaagaatggaaaagtcagagggatgaacttgacagtttttggtggcacggtaacagcctttcttggaattccctatgcacagccacctcttggtagacttcgattcaaaaagccacagtctctgaccaagtggtctgatatttggaatgccacaaaatatgcaaattcttgctgtcagaacatagatcaaagttttccaggcttctttggatcagagatgtggaacccaaacactgacctcagtgaagactgtttatatctaaatgtatggattccagcacctaaaccaaaaaatgccactgtattgatatggatttatggtggtggttttcaatggggaacatcatctttacatgtttatgatggcaagtttctggctcgggttgaaagagttattgtagtgtcaatgaactatagggtgggtgccctaggattcttagctttgccaggaaatcctgaggctccagggaacatgggtttatttgatcaacagttggctcttcagtgggttcaaaaaaatatagcagcctttggtggaaatcctaaaagtgtaactctctttggagaaagtgcaggagcagcttcagttagcctgcatttgctttctcctggaagccattcattgttcaccagagccattctgcaaagtggttccgckaatgctccttgggcggtaacatctctttatgaagctaggaacagaacgttgaacttagctaaattgactggttgctctagagagaatgagactgaaataatcaagtgtcttagaaataaagatccccaagaaattcttctgaatgaagcatttgttgtcccctatgggactaatttgtcagtaaactttggtccgaccgtggatggtgattttctcactgacatgccagacatattacttgaacttggacaatttaaaaaaacccagattttggtgggtgttaataaagatgaagggacagcttttttagcgtatggtgctcctggcttcagcaaagataacaatagtatcataactagaaaagaatttcaggaaggtttaaaaatattttttccaggagtgagtgagtttggaaaggaatccatcctttttcattacacagactgggtagatgatcagagacctgaaaactaccgtgaggccttgggtgatgttgttggggattataatttcatatgccctgccttggagttcaccaagaagttctcagaatggggaaataatgcctttttctactattttgaacaccgatcctccaaacttccgtggccagaatggatgggagtgatgcatggctatgaaattgaatttgtctttggtttacctctggaaagaagagataattacacaaaagccgaggaaattttgagtagatccatagtgaaacggtgggcaaattttgcaaaatatgggaatccaaatgagactcagaacaatagcacaagctggcctgtcttcaaaagcactgaacaaaaatatctaaccttgaatacagagtcaacaagaataatgacgaaactacgtgctcaacaatgtcgattctggacatcattttttccaaaagtcttggaaatgacaggaaatattgatgaagcagaatgggagtggaaagcaggattccatcgctggaacaattacatgatggactggaaaaatcaatttaacgattacactagcaagaaagaaagttgtgtgggtctc

SEQ ID NO: 186 - protein, 574 aa, Artificial
  Synthetic butyrylcholinesterase variant
  VARIANT (77)..(77): H77F
  VARIANT (120)..(120): T120W
  VARIANT (227)..(227): Xaa = Ala
  VARIANT (285)..(285): P285N
  VARIANT (331)..(331): V331A
EDDIIIATKNGKVRGMNLTVFGGTVTAFLGIPYAQPPLGRLRFKKPQSLTKWSDIWNATKYANSCCQNIDQSFPGFFGSEMWNPNTDLSEDCLYLNVWIPAPKPKNATVLIWIYGGGFQWGTSSLHVYDGKFLARVERVIVVSMNYRVGALGFLALPGNPEAPGNMGLFDQQLALQWVQKNIAAFGGNPKSVTLFGESAGAASVSLHLLSPGSHSLFTRAILQSGSXNAPWAVTSLYEARNRTLNLAKLTGCSRENETEIIKCLRNKDPQEILLNEAFVVPYGTNLSVNFGPTVDGDFLTDMPDILLELGQFKKTQILVGVNKDEGTAFLAYGAPGFSKDNNSIITRKEFQEGLKIFFPGVSEFGKESILFHYTDWVDDQRPENYREALGDVVGDYNFICPALEFTKKFSEWGNNAFFYYFEHRSSKLPWPEWMGVMHGYEIEFVFGLPLERRDNYTKAEEILSRSIVKRWANFAKYGNPNETQNNSTSWPVFKSTEQKYLTLNTESTRIMTKLRAQQCRFWTSFFPKVLEMTGNIDEAEWEWKAGFHRWNNYMMDWKNQFNDYTSKKESCVGL

SEQ ID NO: 187 - DNA, 1722 bp, Artificial
  Synthetic butyrylcholinesterase variant
gaagatgacatcataattgcaacaaagaatggaaaagtcagagggatgaacttgacagtttttggtggcacggtaacagcctttcttggaattccctatgcacagccacctcttggtagacttcgattcaaaaagccacagtctctgaccaagtggtctgatatttggaatgccacaaaatatgcaaattcttgctgtcagaacatagatcaaagttttccaggcttctttggatcagagatgtggaacccaaacactgacctcagtgaagactgtttatatctaaatgtatggattccagcacctaaaccaaaaaatgccactgtattgatatggatttatggtggtggttttcaaactggaacatcatctttacatgtttatgatggcaagtttctggctcgggttgaaagagttattgtagtgtcaatgaactatagggtgggtgccctaggattcttagctttgccaggaaatcctgaggctccagggaacatgggtttatttgatcaacagttggctcttcagtgggttcaaaaaaatatagcagcctttggtggaaatcctaaaagtgtaactctctttggagaaagtgcaggagcagcttcagttagcctgcatttgctttctcctggaagccattcattgttcaccagagccattctgcaaagtggttccgckaatgctccttgggcggtaacatctctttatgaagctaggaacagaacgttgaacttagctaaattgactggttgctctagagagaatgagactgaaataatcaagtgtcttagaaataaagatccccaagaaattcttctgaatgaagcatttgttgtcccctatgggactaatttgtcagtaaactttggtccgaccgtggatggtgattttctcactgacatgccagacatattacttgaacttggacaatttaaaaaaacccagattttggtgggtgttaataaagatgaagggacagcttttttagcgtatggtgctcctggcttcagcaaagataacaatagtatcataactagaaaagaatttcaggaaggtttaaaaatattttttccaggagtgagtgagtttggaaaggaatccatcctttttcattacacagactgggtagatgatcagagacctgaaaactaccgtgaggccttgggtgatgttgttggggattataatttcatatgccctgccttggagttcaccaagaagttctcagaatggggaaataatgcctttttctactattttgaacaccgatcctccaaacttccgtggccagaatggatgggagtgatgcatggccaggaaattgaatttgtctttggtttacctctggaaagaagagataattacacaaaagccgaggaaattttgagtagatccatagtgaaacggtgggcaaattttgcaaaatatgggaatccaaatgagactcagaacaatagcacaagctggcctgtcttcaaaagcactgaacaaaaatatctaaccttgaatacagagtcaacaagaataatgacgaaactacgtgctcaacaatgtcgattctggacatcattttttccaaaagtcttggaaatgacaggaaatattgatgaagcagaatgggagtggaaagcaggattccatcgctggaacaattacatgatggactggaaaaatcaatttaacgattacactagcaagaaagaaagttgtgtgggtctc

SEQ ID NO: 188 - protein, 574 aa, Artificial
  Synthetic butyrylcholinesterase variant
  VARIANT (77)..(77): H77F
  VARIANT (227)..(227): Xaa = Ala
  VARIANT (285)..(285): P285N
  VARIANT (331)..(331): V331A
  VARIANT (440)..(440): Y440Q
EDDIIIATKNGKVRGMNLTVFGGTVTAFLGIPYAQPPLGRLRFKKPQSLTKWSDIWNATKYANSCCQNIDQSFPGFFGSEMWNPNTDLSEDCLYLNVWIPAPKPKNATVLIWIYGGGFQTGTSSLHVYDGKFLARVERVIVVSMNYRVGALGFLALPGNPEAPGNMGLFDQQLALQWVQKNIAAFGGNPKSVTLFGESAGAASVSLHLLSPGSHSLFTRAILQSGSXNAPWAVTSLYEARNRTLNLAKLTGCSRENETEIIKCLRNKDPQEILLNEAFVVPYGTNLSVNFGPTVDGDFLTDMPDILLELGQFKKTQILVGVNKDEGTAFLAYGAPGFSKDNNSIITRKEFQEGLKIFFPGVSEFGKESILFHYTDWVDDQRPENYREALGDVVGDYNFICPALEFTKKFSEWGNNAFFYYFEHRSSKLPWPEWMGVMHGQEIEFVFGLPLERRDNYTKAEEILSRSIVKRWANFAKYGNPNETQNNSTSWPVFKSTEQKYLTLNTESTRIMTKLRAQQCRFWTSFFPKVLEMTGNIDEAEWEWKAGFHRWNNYMMDWKNQFNDYTSKKESCVGL

SEQ ID NO: 189 - DNA, 1722 bp, Artificial
  Synthetic butyrylcholinesterase variant
gaagatgacatcataattgcaacaaagaatggaaaagtcagagggatgaacttgacagtttttggtggcacggtaacagcctttcttggaattccctatgcacagccacctcttggtagacttcgattcaaaaagccacagtctctgaccaagtggtctgatatttggaatgccacaaaatatgcaaattcttgctgtcagaacatagatcaaagttttccaggcttccatggatcagagatgtggaacccaaacactgacctcagtgaagactgtttatatctaaatgtatggattccagcacctaaaccaaaaaatgccactgtattgatatggatttatggtggtggttttcaaactggaacatcatctttacatgtttatgatggcaagtttctggctcgggttgaaagagttattgtagtgtcaatgaactatagggtgggtgccctaggattcttagctttgccaggaaatcctgaggctccagggaacatgggtttatttgatcaacagttggctcttcagtgggttcaaaaaaatatagcagcctttggtggaaatcctaaaagtgtaactctctttggagaaagtgcaggagcagcttcagttagcctgcatttgctttctcctggaagccattcattgttcaccagagccattctgcaaagtggttcctttaatgctccttgggcggtaacatctctttatgaagctaggaacagaacgttgaacttagctaaattgactggttgctctagagagaatgagactgaaataatcaagtgtcttagaaataaagatccccaagaaattcttctgaatgaagtctttgttgtcccctatgggactctcttgtcagtaaactttggtccgaccgtggatggtgattttctcactgacatgccagacatattacttgaacttggacaatttaaaaaaacccagattttggtgggtgttaataaagatgaagggacagcttttttagtctatggtgctcctggcttcagcaaagataacaatagtatcataactagaaaagaatttcaggaaggtttaaaaatattttttccaggagtgagtgagtttggaaaggaatccatcctttttcattacacagactgggtagatgatcagagacctgaaaactaccgtgaggccttgggtgatgttgttggggattataatattatatgccctgccttggagttcaccaagaagttctcagaatggggaaataatgcctttttctactattttgaacaccgatcctccaaacttccgtggccagaatggatgggagtgatgcatggctatgaaattgaatttgtctttggtttacctctggaaagaagagataattacacaaaagccgaggaaattttgagtagatccatagtgaaacggtgggcaaattttgcaaaatatgggaatccaaatgagactcagaacaatagcacaagctggcctgtcttcaaaagcactgaacaaaaatatctaaccttgaatacagagtcaacaagaataatgacgaaactacgtgctcaacaatgtcgattctggacatcattttttccaaaagtcttggaaatgacaggaaatattgatgaagcagaatgggagtggaaagcaggattccatcgctggaacaattacatgatggactggaaaaatcaatttaacgattacactagcaagaaagaaagttgtgtgggtctc

SEQ ID NO: 190 - protein, 574 aa, Artificial
  Synthetic butyrylcholinesterase variant
  VARIANT (277)..(277): A277V
  VARIANT (285)..(285): P285L
  VARIANT (398)..(398): F398I
EDDIIIATKNGKVRGMNLTVFGGTVTAFLGIPYAQPPLGRLRFKKPQSLTKWSDIWNATKYANSCCQNIDQSFPGFHGSEMWNPNTDLSEDCLYLNVWIPAPKPKNATVLIWIYGGGFQTGTSSLHVYDGKFLARVERVIVVSMNYRVGALGFLALPGNPEAPGNMGLFDQQLALQWVQKNIAAFGGNPKSVTLFGESAGAASVSLHLLSPGSHSLFTRAILQSGSFNAPWAVTSLYEARNRTLNLAKLTGCSRENETEIIKCLRNKDPQEILLNEVFVVPYGTLLSVNFGPTVDGDFLTDMPDILLELGQFKKTQILVGVNKDEGTAFLVYGAPGFSKDNNSIITRKEFQEGLKIFFPGVSEFGKESILFHYTDWVDDQRPENYREALGDVVGDYNIICPALEFTKKFSEWGNNAFFYYFEHRSSKLPWPEWMGVMHGYEIEFVFGLPLERRDNYTKAEEILSRSIVKRWANFAKYGNPNETQNNSTSWPVFKSTEQKYLTLNTESTRIMTKLRAQQCRFWTSFFPKVLEMTGNIDEAEWEWKAGFHRWNNYMMDWKNQFNDYTSKKESCVGL

SEQ ID NO: 191 - DNA, 1722 bp, Artificial
  Synthetic butyrylcholinesterase variant
gaagatgacatcataattgcaacaaagaatggaaaagtcagagggatgaacttgacagtttttggtggcacggtaacagcctttcttggaattccctatgcacagccacctcttggtagacttcgattcaaaaagccacagtctctgaccaagtggtctgatatttggaatgccacaaaatatgcaaattcttgctgtcagaacatagatcaaagttttccaggcttccatggatcagagatgtggaacccaaacactgacctcagtgaagactgtttatatctaaatgtatggattccagcacctaaaccaaaaaatgccactgtattgatatggatttatggtggtggttttcaaactggaacatcatctttacatgtttatgatggcaagtttctggctcgggttgaaagagttattgtagtgtcaatgaactatagggtgggtgccctaggattcttagctttgccaggaaatcctgaggctccagggaacatgggtttatttgatcaacagttggctcttcagtgggttcaaaaaaatatagcagcctttggtggaaatcctaaaagtgtaactctctttggagaaagtgcaggagcagcttcagttagcctgcatttgctttctcctggaagccattcattgttcaccagagccattctgcaaagtggttccgckaatgctccttgggcggtaacatctctttatgaagctaggaacagaacgttgaacttagctaaattgactggttgctctagagagaatgagactgaaataatcaagtgtcttagaaataaagatccccaagaaattcttctgaatgaagcatttgttgtcccctatgggactcctgggtcagtaaactttggtccgaccgtggatggtgattttctcactgacatgccagacatattacttgaacttggacaatttaaaaaaacccagattttggtgggtgttaataaagatgaagggacagcttttttagtctcgggtgctcctggcttcagcaaagataacaatagtatcataactagaaaagaatttcaggaaggtttaaaaatattttttccaggagtgagtgagtttggaaaggaatccatcctttttcattacacagactgggtagatgatcagagacctgaaaactaccgtgaggccttgggtgatgttgttggggattataatttcatatgccctgccttggagttcaccaagaagttctcagaatggggaaataatgcctttttctactattttgaacaccgatcctccaaacttccgtggccagaatggatgggagtgatgcatggctatgaaattgaatttgtctttggtttacctctggaaagaagagataattacacaaaagccgaggaaattttgagtagatccatagtgaaacggtgggcaaattttgcaaaatatgggaatccaaatgagactcagaacaatagcacaagctggcctgtcttcaaaagcactgaacaaaaatatctaaccttgaatacagagtcaacaagaataatgacgaaactacgtgctcaacaatgtcgattctggacatcattttttccaaaagtcttggaaatgacaggaaatattgatgaagcagaatgggagtggaaagcaggattccatcgctggaacaattacatgatggactggaaaaatcaatttaacgattacactagcaagaaagaaagttgtgtgggtctc

SEQ ID NO: 192 - protein, 574 aa, Artificial
  Synthetic butyrylcholinesterase variant
  VARIANT (227)..(227): Xaa = Ala
  VARIANT (286)..(286): L286G
  VARIANT (332)..(332): Y332S
EDDIIIATKNGKVRGMNLTVFGGTVTAFLGIPYAQPPLGRLRFKKPQSLTKWSDIWNATKYANSCCQNIDQSFPGFHGSEMWNPNTDLSEDCLYLNVWIPAPKPKNATVLIWIYGGGFQTGTSSLHVYDGKFLARVERVIVVSMNYRVGALGFLALPGNPEAPGNMGLFDQQLALQWVQKNIAAFGGNPKSVTLFGESAGAASVSLHLLSPGSHSLFTRAILQSGSXNAPWAVTSLYEARNRTLNLAKLTGCSRENETEIIKCLRNKDPQEILLNEAFVVPYGTPGSVNFGPTVDGDFLTDMPDILLELGQFKKTQILVGVNKDEGTAFLVSGAPGFSKDNNSIITRKEFQEGLKIFFPGVSEFGKESILFHYTDWVDDQRPENYREALGDVVGDYNFICPALEFTKKFSEWGNNAFFYYFEHRSSKLPWPEWMGVMHGYEIEFVFGLPLERRDNYTKAEEILSRSIVKRWANFAKYGNPNETQNNSTSWPVFKSTEQKYLTLNTESTRIMTKLRAQQCRFWTSFFPKVLEMTGNIDEAEWEWKAGFHRWNNYMMDWKNQFNDYTSKKESCVGL

SEQ ID NO: 193 - DNA, 1722 bp, Artificial
  Synthetic butyrylcholinesterase variant
gaagatgacatcataattgcaacaaagaatggaaaagtcagagggatgaacttgacagtttttggtggcacggtaacagcctttcttggaattccctatgcacagccacctcttggtagacttcgattcaaaaagccacagtctctgaccaagtggtctgatatttggaatgccacaaaatatgcaaattcttgctgtcagaacatagatcaaagttttccaggcttccatggatcagagatgtggaacccaaacactgacctcagtgaagactgtttatatctaaatgtatggattccagcacctaaaccaaaaaatgccactgtattgatatggatttatggtggtggttttcaaactggaacatcatctttacatgtttatgatggcaagtttctggctcgggttgaaagagttattgtagtgtcaatgaactatagggtgggtgccctaggattcttagctttgccaggaaatcctgaggctccagggaacatgggtttatttgatcaacagttggctcttcagtgggttcaaaaaaatatagcagcctttggtggaaatcctaaaagtgtaactctctttggagaaagtgcaggagcagcttcagttagcctgcatttgctttctcctggaagccattcattgttcaccagagccattctgcaaagtggttccgckaatgctccttgggcggtaacatctctttatgaagctaggaacagaacgttgaacttagctaaattgactggttgctctagagagaatgagactgaaataatcaagtgtcttagaaataaagatccccaagaaattcttctgaatgaagcatttgttgtcccctatgggactcctttgtcagtaaactttggtccgaccgtggatggtgattttctcactgacatgccagacatattacttgaacttggacaatttaaaaaaacccagattttggtgggtgttaataaagatgaagggacagcttttttagtctatggtgctcctggcttcagcaaagataacaatagtatcataactagaaaagaatttcaggaaggtttaaaaatattttttccaggagtgagtgagtttggaaaggaatccatcctttttcattacacagactgggtagatgatcagagacctgaaaactaccgtgaggccttgggtgatgttgttggggattataatttcatatgccctgccttggagttcaccaagaagttctcagaatggggaaataatgcctttttctactattttgaacaccgatcctccaaacttctctggccagaatgggttggagtgatgcatggctatgaaattgaatttgtctttggtttacctctggaaagaagagataattacacaaaagccgaggaaattttgagtagatccatagtgaaacggtgggcaaattttgcaaaatatgggaatccaaatgagactcagaacaatagcacaagctggcctgtcttcaaaagcactgaacaaaaatatctaaccttgaatacagagtcaacaagaataatgacgaaactacgtgctcaacaatgtcgattctggacatcattttttccaaaagtcttggaaatgacaggaaatattgatgaagcagaatgggagtggaaagcaggattccatcgctggaacaattacatgatggactggaaaaatcaatttaacgattacactagcaagaaagaaagttgtgtgggtctc

SEQ ID NO: 194 - protein, 574 aa, Artificial
  Synthetic butyrylcholinesterase variant
  VARIANT (227)..(227): Xaa = Ala
  VARIANT (429)..(429): P429L
  VARIANT (434)..(434): M434V
EDDIIIATKNGKVRGMNLTVFGGTVTAFLGIPYAQPPLGRLRFKKPQSLTKWSDIWNATKYANSCCQNIDQSFPGFHGSEMWNPNTDLSEDCLYLNVWIPAPKPKNATVLIWIYGGGFQTGTSSLHVYDGKFLARVERVIVVSMNYRVGALGFLALPGNPEAPGNMGLFDQQLALQWVQKNIAAFGGNPKSVTLFGESAGAASVSLHLLSPGSHSLFTRAILQSGSXNAPWAVTSLYEARNRTLNLAKLTGCSRENETEIIKCLRNKDPQEILLNEAFVVPYGTPLSVNFGPTVDGDFLTDMPDILLELGQFKKTQILVGVNKDEGTAFLVYGAPGFSKDNNSIITRKEFQEGLKIFFPGVSEFGKESILFHYTDWVDDQRPENYREALGDVVGDYNFICPALEFTKKFSEWGNNAFFYYFEHRSSKLLWPEWVGVMHGYEIEFVFGLPLERRDNYTKAEEILSRSIVKRWANFAKYGNPNETQNNSTSWPVFKSTEQKYLTLNTESTRIMTKLRAQQCRFWTSFFPKVLEMTGNIDEAEWEWKAGFHRWNNYMMDWKNQFNDYTSKKESCVGL

SEQ ID NO: 195 - DNA, 1722 bp, Artificial
  Synthetic butyrylcholinesterase variant
gaagatgacatcataattgcaacaaagaatggaaaagtcagagggatgaacttgacagtttttggtggcacggtaacagcctttcttggaattccctatgcacagccacctcttggtagacttcgattcaaaaagccacagtctctgaccaagtggtctgatatttggaatgccacaaaatatgcaaattcttgctgtcagaacatagatcaaagttttccaggcttccatggatcagagatgtggaacccaaacactgacctcagtgaagactgtttatatctaaatgtatggattccagcacctaaaccaaaaaatgccactgtattgatatggatttatggtggtggttttcaaactggaacatcatctttacatgtttatgatggcaagtttctggctcgggttgaaagagttattgtagtgtcaatgaactatagggtgggtgccctaggattcttagctttgccaggaaatcctgaggctccagggaacatgggtttatttgatcaacagttggctcttcagtgggttcaaaaaaatatagcagcctttggtggaaatcctaaaagtgtaactctctttggagaaagtgcaggagcagcttcagttagcctgcatttgctttctcctggaagccattcattgttcaccagagccattctgcaaagtggttccgckaatgctccttgggcggtaacatctctttatgaagctaggaacagaacgttgaacttagctaaattgactggttgctctagagagaatgagactgaaataatcaagtgtcttagaaataaagatccccaagaaattcttctgaatgaagcatttgttgtcccctatgggactaatttgtcagtaaactttggtccgaccgtggatggtgattttctcactgacatgccagacatattacttgaacttggacaatttaaaaaaacccagattttggtgggtgttaataaagatgaagggacagcttttttagcgtatggtgctcctggcttcagcaaagataacaatagtatcataactagaaaagaatttcaggaaggtttaaaaatattttttccaggagtgagtgagtttggaaaggaatccatcctttttcattacacagactgggtagatgatcagagacctgaaaactaccgtgaggccttgggtgatgttgttggggattataatttcatatgccctgccttggagttcaccaagaagttctcagaatggggaaataatgcctttttctactattttgaacaccgatcctccaaacttccgtggccagaatggatgggagtgatgcatggctatgaaattgaatttgtctttggtttacctctggaaagaagagataattacacaaaagccgaggaaattttgagtagatccatagtgaaacggtgggcaaattttgcaaaatatgggaatccaaatgagactcagaacaatagcacaagctggcctgtcttcaaaagcactgaacaaaaatatctaaccttgaatacagagtcaacaagaataatgacgaaactacgtgctcaacaatgtcgattctggacatcattttttccaaaagtcttggaaatgacaggaaatattgatgaagcagaatgggagtggaaagcaggattccatcgctggaacaattacatgatggactggaaaaatcaatttaacgattacactagcaagaaagaaagttgtgtgggtctc

SEQ ID NO: 196 - protein, 574 aa, Artificial
  Synthetic butyrylcholinesterase variant
  VARIANT (227)..(227): Xaa = Ala
  VARIANT (285)..(285): P285N
  VARIANT (331)..(331): V331A
EDDIIIATKNGKVRGMNLTVFGGTVTAFLGIPYAQPPLGRLRFKKPQSLTKWSDIWNATKYANSCCQNIDQSFPGFHGSEMWNPNTDLSEDCLYLNVWIPAPKPKNATVLIWIYGGGFQTGTSSLHVYDGKFLARVERVIVVSMNYRVGALGFLALPGNPEAPGNMGLFDQQLALQWVQKNIAAFGGNPKSVTLFGESAGAASVSLHLLSPGSHSLFTRAILQSGSXNAPWAVTSLYEARNRTLNLAKLTGCSRENETEIIKCLRNKDPQEILLNEAFVVPYGTNLSVNFGPTVDGDFLTDMPDILLELGQFKKTQILVGVNKDEGTAFLAYGAPGFSKDNNSIITRKEFQEGLKIFFPGVSEFGKESILFHYTDWVDDQRPENYREALGDVVGDYNFICPALEFTKKFSEWGNNAFFYYFEHRSSKLPWPEWMGVMHGYEIEFVFGLPLERRDNYTKAEEILSRSIVKRWANFAKYGNPNETQNNSTSWPVFKSTEQKYLTLNTESTRIMTKLRAQQCRFWTSFFPKVLEMTGNIDEAEWEWKAGFHRWNNYMMDWKNQFNDYTSKKESCVGL

SEQ ID NO: 197 - DNA, 642 bp, Artificial
  Synthetic butyrylcholinesterase variant
  misc_feature (1)..(642): Anti-CD20 antibody light chain
gaaattgtgttgacgcagtctccaggcaccctgtctttgtctccaggggaaagagccaccctctcctgcagggccagctcaagtgtaccgtacatccactggtaccagcagaaacctggccaggctcccaggctcctcatctatgccacatccgctctggcttctggcatcccagacaggttcagtggcagtgggtctgggacagacttcactctcaccatcagcagactggagcctgaagattttgcagtgtattactgtcagcagtggctgagtaacccacccacttttggccaggggaccaagctggagatcaaacgaactgtggctgcaccatctgtcttcatcttcccgccatctgatgagcagttgaaatctggaactgcctctgttgtgtgcctgctgaataacttctatcccagagaggccaaagtacagtggaaggtggataacgccctccaatcgggtaactcccaggagagtgtcacagagcaggacagcaaggacagcacctacagcctcagcagcaccctgacgctgagcaaagcagactacgagaaacacaaagtctacgcctgcgaagtcacccatcagggcctgagctcgcccgtcacaaagagcttcaacaggggagagtgttag

SEQ ID NO: 198 - protein, 213 aa, Artificial
  Synthetic butyrylcholinesterase variant
  MISC_FEATURE (1)..(213): Anti-CD20 antibody light chain
EIVLTQSPGTLSLSPGERATLSCRASSSVPYIHWYQQKPGQAPRLLIYATSALASGIPDRFSGSGSGTDFTLTISRLEPEDFAVYYCQQWLSNPPTFGQGTKLEIKRTVAAPSVFIFPPSDEQLKSGTASVVCLLNNFYPREAKVQWKVDNALQSGNSQESVTEQDSKDSTYSLSSTLTLSKADYEKHKVYACEVTHQGLSSPVTKSFNRGEC

SEQ ID NO: 199 - DNA, 2298 bp, Artificial
  Synthetic butyrylcholinesterase variant
  misc_feature (1)..(2298): Anti-CD20 antibody VH-CH1 hinge cys L530 BChE.4-1 heavy chain construct
gaggtgcagctggtgcagtctggagcagaggtgaaaaagcccggggagtctctgaagatctcctgtaagggttctggccgtacatttaccagttacaatatgcactgggtgcgccagatgcccgggaaaggcctggagtggatgggggctatttatcccttgacgggtgatacttcctacaatcagaagtcgaaactccaggtcaccatctcagccgacaagtccatcagcaccgcctacctgcagtggagcagcctgaaggcctcggacaccgccatgtattactgtgcgagatcgacttacgtgggcggtgactggcagttcgatgtctggggcaaggggaccacggtcaccgtctcctcagcctccaccaagggcccatcggtcttccccctggcaccctcctccaagagcacctctgggggcacagcggccctgggctgcctggtcaaggactacttccccgaaccggtgacggtgtcgtggaactcaggcgccctgaccagcggcgtgcacaccttcccggctgtcctacagtcctcaggactctactccctcagcagcgtggtgaccgtgccctccagcagcttgggcacccagacctacatctgcaacgtgaatcacaagcccagcaacaccaaggtggacaagaaagcagagcccaaatcttgtgacaaaactcacacatgcccaccgtgcccaaagcttgaagatgacatcataattgcaacaaagaatggaaaagtcagagggatgaacttgacagtttttggtggcacggtaacagcctttcttggaattccctatgcacagccacctcttggtagacttcgattcaaaaagccacagtctctgaccaagtggtctgatatttggaatgccacaaaatatgcaaattcttgctgtcagaacatagatcaaagttttccaggcttctttggatcagagatgtggaacccaaacactgacctcagtgaagactgtttatatctaaatgtatggattccagcacctaaaccaaaaaatgccactgtattgatatggatttatggtggtggttttcaaactggaacatcatctttacatgtttatgatggcaagtttctggctcgggttgaaagagttattgtagtgtcaatgaactatagggtgggtgccctaggattcttagctttgccaggaaatcctgaggctccagggaacatgggtttatttgatcaacagttggctcttcagtgggttcaaaaaaatatagcagcctttggtggaaatcctaaaagtgtaactctctttggagaaagtgcaggagcagcttcagttagcctgcatttgctttctcctggaagccattcattgttcaccagagccattctgcaaagtggttccgctaatgctccttgggcggtaacatctctttatgaagctaggaacagaacgttgaacttagctaaattgactggttgctctagagagaatgagactgaaataatcaagtgtcttagaaataaagatccccaagaaattcttctgaatgaagcatttgttgtcccctatgggactaatttgtcagtaaactttggtccgaccgtggatggtgattttctcactgacatgccagacatattacttgaacttggacaatttaaaaaaacccagattttggtgggtgttaataaagatgaagggacagcttttttagcgtatggtgctcctggcttcagcaaagataacaatagtatcataactagaaaagaatttcaggaaggtttaaaaatattttttccaggagtgagtgagtttggaaaggaatccatcctttttcattacacagactgggtagatgatcagagacctgaaaactaccgtgaggccttgggtgatgttgttggggattataatttcatatgccctgccttggagttcaccaagaagttctcagaatggggaaataatgcctttttctactattttgaacaccgatcctccaaacttccgtggccagaatggatgggagtgatgcatggctatgaaattgaatttgtctttggtttacctctggaaagaagagataattacacaaaagccgaggaaattttgagtagatccatagtgaaacggtgggcaaattttgcaaaatatgggaatccaaatgagactcagaacaatagcacaagctggcctgtcttcaaaagcactgaacaaaaatatctaaccttgaatacagagtcaacaagaataatgacgaaactacgtgctcaacaatgtcgattctggacatcattttttccaaaagtctga

SEQ ID NO: 200 - protein, 765 aa, Artificial [sequence omitted]

SEQ ID NO: 201 - protein, 530 aa, Artificial
  Synthetic butyrylcholinesterase variant
  MISC_FEATURE (1)..(530): L530 construct
EDDIIIATKNGKVRGMNLTVFGGTVTAFLGIPYAQPPLGRLRFKKPQSLTKWSDIWNATKYANSCCQNIDQSFPGFFGSEMWNPNTDLSEDCLYLNVWIPAPKPKNATVLIWIYGGGFQTGTSSLHVYDGKFLARVERVIVVSMNYRVGALGFLALPGNPEAPGNMGLFDQQLALQWVQKNIAAFGGNPKSVTLFGESAGAASVSLHLLSPGSHSLFTRAILQSGSXNAPWAVTSLYEARNRTLNLAKLTGCSRENETEIIKCLRNKDPQEILLNEAFVVPYGTNLSVNFGPTVDGDFLTDMPDILLELGQFKKTQILVGVNKDEGTAFLAYGAPGFSKDNNSIITRKEFQEGLKIFFPGVSEFGKESILFHYTDWVDDQRPENYREALGDVVGDYNFICPALEFTKKFSEWGNNAFFYYFEHRSSKLPWPEWMGVMHGYEIEFVFGLPLERRDNYTKAEEILSRSIVKRWANFAKYGNPNETQNNSTSWPVFKSTEQKYLTLNTESTRIMTKLRAQQCRFWTSFFPKVL

1-104. (canceled)

105. A butyrylcholinesterase variant comprising an amino acid sequence selected from the group consisting of SEQ ID NO: 4, 6, 8, 10, 12, 14, 24, 26, 28, 30, 32, 34, 36, 38, 40, 42, 44, 46, 48, 50, 52, 54, 56, 58, 60, 62, 64, 66, 68, 70, 72, 74, 76, 78, 80, 82, 84, 86, 88, 90, 92, 94, 96, 98, 100, 102, 104, 106, 108, 110, 112, 114, 116, 118, 120, 122, 124, 126, 128, 130, 132, 134, 136, 138, 140, 142, 144, 146, 148, 150, 152, 154, 156, 158, 160, 162, 164, 166, 168, 170, 172, 174, 176, 178, 180, 182, 184, 186, 188, 190, 192, 194, and 196, or a functional fragment thereof, wherein the variant or fragment comprises alanine at amino acid position 227.

106. The butyrylcholinesterase variant of claim 105, wherein the amino acid sequence is selected from the group consisting of SEQ ID NO: 24, 26, 30, 32, 34, 36, 38, 104, 106, 108, 110, 112, 116, 118, 120, 122, 124, 126, 128, 132, 134, 136, 140, and 142,or a functional fragment thereof.

107. The butyrylcholinesterase variant of claim 106, wherein the amino acid sequence is selected from the group consisting of SEQ ID NO: 36, 108, 110, 112, 122, 124, 134, 178, 180, 182, 186, 188, 190, 192 and 196, or a functional fragment thereof.

108. The butyrylcholinesterase variant of claim 107, wherein the amino acid sequence is selected from the group consisting of SEQ ID NO: 178, 180, and 188, or a functional fragment thereof.

109. The butyrylcholinesterase variant of claim 108, wherein the amino acid sequence is SEQ ID NO: 180 or a functional fragment thereof.

110. The butyrylcholinesterase variant of claim 105, having at least a two-fold increase in camptothecin conversion activity compared to butyrylcholinesterase, or functional fragment thereof.

111. The butyrylcholinesterase variant of claim 110, having at least a fifty-fold increase in camptothecin conversion activity compared to butyrylcholinesterase, or functional fragment thereof.

112. The butyrylcholinesterase variant of claim 111, having at least a one hundred-fold increase in camptothecin conversion activity compared to butyrylcholinesterase, or functional fragment thereof.

113. The butyrylcholinesterase variant of claim 112, having at least a five hundred-fold increase in camptothecin conversion activity compared to butyrylcholinesterase, or functional fragment thereof.

114. The butyrylcholinesterase variant of claim 113, having at least a fifteen hundred-fold increase in camptothecin conversion activity compared to butyrylcholinesterase, or functional fragment thereof.

115. The butyrylcholinesterase variant of claim 114, having at least a two thousand-fold increase in camptothecin conversion activity compared to butyrylcholinesterase, or functional fragment thereof.

116. The butyrylcholinesterase variant of claim 115, having at least a two thousand five hundred-fold increase in camptothecin conversion activity compared to butyrylcholinesterase, or functional fragment thereof.

117. The butyrylcholinesterase variant of claim 116, having at least a three thousand-fold increase in camptothecin conversion activity compared to butyrylcholinesterase, or functional fragment thereof.

118. The butyrylcholinesterase variant of claim 105, or functional fragment thereof, further comprising an antibody or antibody fragment which specifically binds the epidermal growth factor receptor (EGFR).

119. The butyrylcholinesterase variant of claim 118, wherein the antibody or antibody fragment comprises an amino acid sequence as shown in SEQ ID NO: 18 or 20.

120. The butyrylcholinesterase variant of claim 105, further comprising an antibody or antibody fragment which specifically binds the CD20 cell surface antigen.

121. The butyrylcholinesterase variant of claim 120, wherein the antibody or antibody fragment comprises an amino acid sequence as shown in SEQ ID NO: 198.

122. A nucleic acid encoding a butyrylcholinesterase variant comprising the nucleic acid sequence selected from the group consisting of SEQ ID NO: 3, 5, 7, 9, 11, 13, 23, 25, 27, 29, 31, 33, 35, 37, 39, 41, 43, 45, 47, 49, 51, 53, 55, 57, 59, 61, 63, 65, 67, 69, 71, 73, 75, 77, 79, 81, 83, 85, 87, 89, 91, 93, 95, 97, 99, 101, 103, 105, 107, 109, 111, 113, 115, 117, 119, 121, 123, 125, 127, 129, 131, 133, 135, 137, 139, 141, 143, 145, 147, 149, 151, 153, 155, 157, 159, 161, 163, 165, 167, 169, 171, 173, 175, 177, 179, 181, 183, 185, 187, 189, 191, 193, and 195, or a fragment thereof.

123. The nucleic acid of claim 122, wherein the nucleic acid sequence is selected from the group consisting of SEQ ID NO: 177, 179, 181, 183, 185, 187, 189, 191, 193, and 195, or a fragment thereof.

124. A method of converting a camptothecin derivative to a topoisomerase inhibitor comprising contacting said camptothecin derivative with a butyrylcholinesterase variant comprising an amino acid sequence selected from SEQ ID NOS: 2, 4, 6, 8, 10, 12, 14, 24, 26, 28, 30, 32, 34, 36, 38, 40, 42, 44, 46, 48, 50, 52, 54, 56, 58, 60, 62, 64, 66, 68, 70, 72, 74, 76, 78, 80, 82, 84, 86, 88, 90, 92, 94, 96, 98, 100, 102, 104, 106, 108, 110, 112, 114, 116, 118, 120, 122, 124, 126, 128, 130, 132, 134, 136, 138, 140, 142, 144, 146, 148, 150, 152, 154, 156, 158, 160, 162, 164, 166, 168, 170, 172, 174, 176, 178, 180, 182, 184, 186, 188, 190, 192, 194 and 196, or functional fragment thereof, under conditions that allow conversion of a camptothecin derivative to a topoisomerase inhibitor.

125. The method of claim 124, wherein said butyrylcholinesterase variant is selected from the group consisting of SEQ ID NOS: 24, 26, 30, 32, 34, 36, 38, 104, 106, 108, 110, 112, 116, 118, 120, 122, 124, 126, 128, 132, 134, 136, 140 and 142, or functional fragment thereof.

126. The method of claim 125, wherein said butyrylcholinesterase variant is selected from the group consisting of SEQ ID NO: 178, 180, 182, 184, 188 and 192, or functional fragment thereof.

127. The method of claim 126, wherein said butyrylcholinesterase variant is SEQ ID NO: 180, or functional fragment thereof.

128. The method of claim 124, wherein said butyrylcholinesterase variant exhibits a two-fold or greater increase in conversion capability compared to butyrylcholinesterase.

129. The method of claim 128, wherein said butyrylcholinesterase variant exhibits a fifty-fold or greater increase in conversion capability compared to butyrylcholinesterase.

130. The method of claim 129, wherein said butyrylcholinesterase variant exhibits a one hundred-fold or greater increase in conversion capability compared to butyrylcholinesterase.

131. The method of claim 130, wherein said butyrylcholinesterase variant exhibits a five hundred-fold or greater increase in conversion capability compared to butyrylcholinesterase.

132. The method of claim 131, wherein said butyrylcholinesterase variant exhibits a fifteen hundred-fold or greater increase in conversion capability compared to butyrylcholinesterase.

133. The method of claim 132, wherein said butyrylcholinesterase variant exhibits a two thousand-fold or greater increase in conversion capability compared to butyrylcholinesterase.

134. The method of claim 133, wherein said butyrylcholinesterase variant exhibits a two thousand five hundred-fold or greater increase in conversion capability compared to butyrylcholinesterase.

135. The method of claim 134, wherein said butyrylcholinesterase variant exhibits a three thousand-fold or greater increase in conversion capability compared to butyrylcholinesterase.

136. The method of claim 124, wherein said topoisomerase inhibitor is SN-38.

137. The method of claim 136, wherein said camptothecin derivative is CPT-11.

138. A method of treating cancer comprising administering to an individual an effective amount of a butyrylcholinesterase variant selected from SEQ ID NOS: 2, 4, 6, 8, 10, 12, 14, 24, 26, 28, 30, 32, 34, 36, 38, 40, 42, 44, 46, 48, 50, 52, 54, 56, 58, 60, 62, 64, 66, 68, 70, 72, 74, 76, 78, 80, 82, 84, 86, 88, 90, 92, 94, 96, 98, 100, 102, 104, 106, 108, 110, 112, 114, 116, 118, 120, 122, 124, 126, 128, 130, 132, 134, 136, 138, 140, 142, 144, 146, 148, 150, 152, 154, 156, 158, 160, 162, 164, 166, 168, 170, 172, 174, 176, 178, 180, 182, 184, 186, 188, 190, 192, 194, and 196, or functional fragment thereof, exhibiting increased capability to convert a camptothecin derivative to a topoisomerase inhibitor compared to butyrylcholinesterase.

139. The method of claim 138, wherein said cancer is metastatic colorectal cancer.

140. The method of claim 138, wherein said cancer is ovarian cancer.

141. The method of claim 138, wherein said cancer is lung cancer.

142. The method of claim 138, wherein said cancer is non-Hodgkin's lymphoma.

143. The method of claim 138, wherein said topoisomerase inhibitor is SN-38.

144. The method of claim 143, wherein said camptothecin derivative is CPT-11.

145. The method of claim 138, wherein said butyrylcholinesterase variant further comprises an antibody or antibody fragment that specifically binds the epidermal growth factor receptor (EGFR).

146. The method of claim 145, wherein said antibody or antibody fragment comprises an amino acid sequence as shown in SEQ ID NOS: 18 and 20.

147. The method of claim 138, wherein said butyrylcholinesterase variant further comprises an antibody or antibody fragment that specifically binds the CD20 cell surface antigen.

148. The method of claim 147, wherein said antibody or antibody fragment comprises an amino acid sequence as shown in SEQ ID NO: 198.

149. The method of claim 138, wherein said butyrylcholinesterase variant comprises the amino acid sequence designated as SEQ ID NO: 180, or functional fragment thereof.

150. The method of claim 138, wherein said functional fragment is an L530 truncation (SEQ ID NO: 201).
